United States Patent Application Publication US 2009/0191541 A1 - sequence listing, part 3

SEQ ID NO: 13353 - DNA, 403 bp, Glycine max
  unsure at all n locations
ccttatctatccacacccctctattaactaaattaacttccttaaaaataattacggatgaaaataacgcaacaaataatcaaacatcaaacataattactaataatatatagatatatatcagggtgttacaactctcccacccttttagaaatntcatcctcgaaatttaccttactcaaacaaggatgggtgagcttctcgcatctgactttctaattcccacgtggcatctcatccagatgcacctccccagatcaccttgaccaacggaatctctntccctcttaagtgttgtgttcgcctatcctcgatcctcaaaggcaatgtttcatatgtcaaattctccttcacttgtacatcatccaattcaatcacatgggatggatcacggatatactta

SEQ ID NO: 13354 - DNA, 395 bp, Glycine max
  unsure at all n locations
agcttctatagaaggttcgttcctatattttatacaattgcatcacctctcaatgagttggtgaagaagaatttggcatttacctagggtgaaaaacaagagcaagcatttgctttgctcaaagaanagcttactaaggcacctgttctagcttttcctgacttttctaaaacttttgagctagaatgtgatgcctctggagtgggtgttggagttgtattgttacaaggaaggcaccctattgcttattttagttaaaaacttcatagtgccaccttcaactaccccacctatgataaagagctttatgccttaataagagccctccaaacttgggaacattaccttgtttccaaggaatttgtcattcatagtgatcatcaatcacttaagta

SEQ ID NO: 13355 - DNA, 446 bp, Glycine max
  unsure at all n locations
agcttgccgcgacacctaaattcgatgtactgtttatcctcatgctggatcagttggaacatggatgccagagtggcaagggcatcggccatctaattctccactctggggatgtggtgaaaggatacgtcatcaaagtactctatcagttttctaatgtaggcctggtagggtatcaacttatgatccctggtctcctattctcctttcaattggtggattaccaaggctaagtccccatataccttgagcaacttgaccttgaagtcaatttccgcttggatcccaagggcatacgcctcatattcagccatgttgttcgtgcagtcaaagcccaacctagtcgtgaagggtatacatngatcgttgggtgtaaccaaaagcaccccaactccatggcctagtgcattagacgccaccgtaaaccacacaatccatttgcccta

SEQ ID NO: 13356 - DNA, 407 bp, Glycine max
  unsure at all n locations
gcttaagctccttcttctgcacaaggctcttaatatttgaagagtatccttgtggaaccttcacccgacgaagacactgacaaaaacttatcttctcctttntggacaaagtatggcaagctgggggcaagtaaatnttcttcccatcagacattggatgcaactgtgatcgtatgcccatatcagctagatcttgacgggtattcaagccatccttcgtctttccttgaatgttaaggagcatcccaatcacactgtcacaaacatttttctcgacatgcataacatcaatacaatgtctaatgtcaagatcagaccagtacggaagatcaaagannatcgacctcttcttccatatgcaactcttacttatatccttcttttgggtctttccaaatacattattc

SEQ ID NO: 13357 - DNA, 159 bp, Glycine max
agccatttccgcaccttttcctctgtccactttcaaccgttcctccaaatgtaaaatggcctatcggaatacattttctacatcctaactactataaaacaacctttagacttacgtttgctactctcatggtctcaatactgccgccgaaattctgtc

SEQ ID NO: 13358 - DNA, 397 bp, Glycine max
  unsure at all n locations
agctngaatataaactaaatgccttggtattttggtaacccaactggccatgtatcagaaatatgcacctgtcgcaagactctgtggtttatgctcctctgccgaccaccatacagacctttgcccctctgtgctgcaatctggagcaattgaacagtctgaagcatatgctgccaacatctacaatagacctcctcaacctcagcagcaaaatctgccacaacagaacaattatgacctctccaacaacaggtacaatcccgggtggaggaatcatcccaaccttagatggtcaagtcctccacaacagcagcaacaacaacagccttattttcataatgctgctggcccaagcagatcatacgttcctccaccaatccagcaccaacaacaacag

SEQ ID NO: 13359 - DNA, 341 bp, Glycine max
  unsure at all n locations
agctntataaaccaatattacttacctattttcacttgcttggatccagtaacaatataaccttctacaccacgaacaatatccctttgataatgctgaaaacacaattgtgatttggagctatgatcagcctaggggagaagggataaatcgacatcaactataaatgaaaacaaagaattgaaatcaaagaaccaggtaaccttccccgcacgtgtcgatatataaagtatctcaagtttctggtgtagctggagctccactccatcagtaaccacattatctgaaccttcataaccgccacccccaaactgcttcagaacagtctaaatagcaacact

SEQ ID NO: 13360 - DNA, 439 bp, Glycine max
  unsure at all n locations
nagcttatcaaggacatgtttggataatttatacattctataaaatttaattattgatagaataaaaatatattcttgttataattactttaattattattatataatcgntgtaatcgagcccgcactattaaggtttgtttacaatttaaaaaagttaagtatttttagtgtaaattttctttttttaagtagattttagatagattagggattaggtagattttatgcaaactcaataaactctcaatttataactgtattttgttttgttgctttagttattttcaattgatgtgttattcttaaataaaagaatttttaattttaataacatcaaatccttaataataatattattgaaatatttaattgatacattatttatatacttgagtctgataagcttgagtgcgaaccatgatcactgcaatacaag

SEQ ID NO: 13361 - DNA, 417 bp, Glycine max
gcttatgcttcaaacatttataatagaccttcttagcagcaaaaccaacaacaacagaataattatgacctttcaagcaacagatacaatcctggatggagaaatcatccaaatctgagatgggcaagtcctccacaacaacaacagtctatccatccttttcagaatgctgctggtccaagcaagccatatgttcctcctccaatacagcagctgtcacaacaaagaaaacaagcaactgacgctcctcctcaaccttctttagaagaattagtgaggcaaatgaccatccagaatatgcaatttcaacaagagacaagtgtttgatcaagtggactcggaataattaagaaggggggtgaattaattattaatgaacctttactaattaaaaatccatccttcttaatggtacta

SEQ ID NO: 13362 - DNA, 454 bp, Glycine max
  unsure at all n locations
agctgtcaanagggaagcaagttaaaaattgttttcaaagtaaatacgttgtttctacttcaaaaccccttgaactacttcacattgacttatttggtccctcgaaaactatgggttttggtggtaattactatgtcctagttataatagatgattactcaaggttcacatggactttatttntgaaaaccacaagtgaagcttttgatgcttttcgcanacttgccaaggtgattcaaaatgaaaaaggtctcaacattgtttcacttagaagtgatcatggaggtgaatttcaaaatgagtatttgaaaacttttgtgaagaaaatgaaattcaccataatgtttctacctcaagaacacctcaacaaaatggtgttgtggagaaggaaaatagatcccttgaagaaggtgcaagaacccttcaaatgaaacaaagtacctaagtacttttg

SEQ ID NO: 13363 - DNA, 327 bp, Glycine max
taacgttttactcggatgtccaattgagtcccgtaatatatcgacacgctcgaaattgaatgttgaagctctgagccaattcaaacaacaataactttttactcggatgtccgattgagtgacttaatatatcgggacgctcgaaattgaatgttgaacctctgagcacattcaaacgacaataactttttagtcggatgtttgattcagtttcgtcatatatcgagacgctcgaaattgaattttgaacctctgagccaattcaaacgacaataacattttactcgaatgtctgattgagtcccgtaatatattgagacgctcgaa

SEQ ID NO: 13364 - DNA, 428 bp, Glycine max
  unsure at all n locations
agcttgtttcactattgaagttagatagttttatctttgcatttctaaccattgaggatcaaaccaactttntaatcactgccaacctataaaatctgatgtggggtacagctaatgtttatattcttcaagttggatttgctgtatttttggaaaatttcatttcattgttctcaatttttgtggaataatggtgttctcttgtgtattaactgtcataattgtttaattttcaaatacagagataatcgctcctccagatcatcacttgtagatggttttgatagtctggaggagggtggtctaagggcttcttcttcttactcacgtgaaattaatgagcatgataatgataaagccatagagaagttggaggacagagtttcgtttctgaaacgagtgagttttttctatcaagtactatttca

SEQ ID NO: 13365 - DNA, 373 bp, Glycine max
  unsure at all n locations
cttcaagtagtgcatgatatgcttccagagaataacacattttctaaaagttactatcaggccaagaagatactgtgtccaatgggtatggagtattataagattcatgcttgcccccaatgattgcatattgtacagacatgaatttgaagaaatgtccaaatgccctacgtgtggggtatcacggcataaaatcaatgatgatgaggagtgtagtagtgatgaaaactcaaaaaaggacccctcagtgaaggtgttgtggtatctgtcgatcattccaaggtttaagcgactttntgctaatggagacaaaaccttacatggcacgcaaatggcagaaactgtgatggaatagtccgtcatccggttgatt

SEQ ID NO: 13366 - DNA, 445 bp, Glycine max
  unsure at all n locations
agcttcaacggtgtgttagggttgatgcgggttattccattcactttatatcgtanctttccattaattatggctttagaatttgccaacacaagtgttctttgaacagggatggttccatagtggaatgagccctgaggatttggtcgaactgcatttgctgtcaaattcagtcttcaaaacaacacaatagaacacagtctgagcctatgatcaccagatccccaattatttttttttttggttataggtaagaatcaaaaaattcataaaactgatacacattactgaattaactaagaaaatatgttctatttacctcttaatttaaattgttaaaaattataaacttaagaatgtcatatttccatttcatcttaatttttatattaaatatataaatcaagtaaccaacgtatattttttactatttatataatatttg

SEQ ID NO: 13367 - DNA, 404 bp, Glycine max
gataatcaatgaacattgccatagatagtgaaaaaaattattaataacctcattcaaaaataaacatgtcatggttgagcttactttaattcattgtttatgtcatagtttaaatgataaacgagacagaggtagcttagttatttcattattaaatcaattggttaattaaacattgctcaaagaattcataattataatttgttcataaaaaattgcaacagaaaaatattgatgagctaattaaatgttatatttttaatactatctttaagattgcaacattttaagattgtagttatcaaatgcatgatacaaaagaagtgtgtgttgatcattatactgctccatgaataattgaagcttgcattaattattataacatgtcattatttatcatacca

SEQ ID NO: 13368 - DNA, 459 bp, Glycine max
  unsure at all n locations
cctttaatgtttcagagtacccaaacaatattccattatcacacttagagacaaactttcctaagttgtccttagtgtttaaaatgaaacattgacatctaaagtgatggaagtatgatatgttggggtttggtcctttccacaattcatatgaagtcttttttagaataggtcttacgtatattttgttttgtgaataatatgtaatattcactaattcagctcataagtgcttaggagtaaaaaatattattaagcatggcctttgtcatttcctataattatttgttcttccctccaaccacaccattctgttaaagtgttctaggagttgaaaagttgtgaaggatactattttcctcacaaaatagttgaaaattcacattttcaaatttntctccatggtcacttctcattgaagcaatgcatactccttctatanttttcaatcttgttcat

SEQ ID NO: 13369 - DNA, 265 bp, Glycine max
taatggacacacatgaacatcgctacgcaacgacattcatggcgctccgaacatacgtggagtattgaggattgccttgagggtccgcacttaagcgatcatgaaactatgctccatacatcatagtggaggacacatgaacaaccctaagcaataatattcatgtggcgccgaaaaaggatgagaatggaggatggccttgagggtcctctcttatgcaatcatggaacacagactacaactctcaaacggaggacacatgaat

SEQ ID NO: 13370 - DNA, 457 bp, Glycine max
  unsure at all n locations
ctaagctttacatgcttggaagtatagataagtggaatattaagcttatataagagattncttagtagtgggacaataactatgtgtaaggcaaaaattctgtttatcattcaaactcatctccataataaacataatttgggacaaggtatcaattaaaattagctactagtttaatagatgtgagtgggcttaaaacatattgtaagttggaagtaataaataattatagtttccttttcttaaactgtttgactgcttaagtatgaatattgttgtatctctaaaacatagaatgttacactattgcaataccatcaatataatcctttcaatggaacaaaatctaaaaatatatattataacacaataaactaattatactgaactgagtcttaaatcaagattcaaatgtggaattgccaccttatttagtaactcgtatttctcatagcta

SEQ ID NO: 13371 - DNA, 343 bp, Glycine max
  unsure at all n locations
ggtgatgacaaactaacatggttgntgtgtacgtcataccatcacataatattccccttgtcttcctttgaagcgactttaagtattccatggctgccccaatggtgcttttcacaaaacaaaacaaaatactcaggcaaattcacttatctaaagcaattgacaacatatatctcttgcaacataaacaaagcacctacttgtatacttgccactcagaaggaggagcataaatacagcctttgctgtcctatgctcacatatcatgccacctgcacacagaaataagaacattcaatcacttatatcctagaaaatgttcaacaggagttacagagaactt

SEQ ID NO: 13372 - DNA, 285 bp, Glycine max
gttcatgctgggggtcttcaaacaagcaatagggagaggggaaggagcttcacacttatgagcaaaaaatgttcctacaagaacaccaggtgcttgagtccctctattgcttggcctcacttcatgaacattgaaacctttctcatcactgctcttggctggtccccaaatacatgagtttctctcacactggtctgtgagatctgacctaacacacctgattttgtcaagtgagggtttctcatgtgtggtggtgacaacatggcctaacgctttatagccatc

SEQ ID NO: 13373 - DNA, 486 bp, Glycine max
  unsure at all n locations
ngaaaaactgtctatatgcagcagcccccaggcttcgaatatgacaataaccttgtttataaactgaacaaggctctttatgggctgaagaaagcacttcgtgcatggttttaaaagctttcagcaactcttatctctcttgggttcaaggctagcaagtgtgacccttccttatttgcctcttcctcatgtggaaacacaacttatgcgcttgtctatgtggatgacataatcctcactggaaataacagtgttctaattcaacaacttatttcacagctaaactttattttctctcttaaacatcttggcaagttagactacttccttggaattgaagtcaagtataattttgcaggttttgtcatgctttctcaaaccaaatacatctcagattntcttgaaagagtaaatatggaagaagctaaaggaattttcacccttatggttggtaatctcaaattgtcaaagcaagaaactacatgc

SEQ ID NO: 13374 - DNA, 369 bp, Glycine max
  unsure at all n locations
agctttgagcaatttcaatcgacaataactntttacatggatgcctgattgagtcccgtcatatatcgagacgctcgaaatngaatgtagaagctctgagccaattaagacgacaatatctttntactcggatgtctgattgagtcccgtcatatatcgagacgctcgaaattgaatgttgatgctctgagcaaattcaaacgacaataaatctntactcggatgtctgattgagtcccgtcacatatctagatgctcgaaattgaatgttgatgctctgagcaaattcaaacgacaatatctctttactcggatgtctgattgagtcccgtaacatatcgagacgctcganattgaatgttgaagctc

SEQ ID NO: 13375 - DNA, 341 bp, Glycine max
  unsure at all n locations
caaactcagtttggtgtttccatcaagtgcctcaaatctgacaatgctaaagagcttgccctcactcagttnttggcttccataggcactcttcatcaattttcctgtattgagagacaagaacaaaattcagtggttgaaaagaatcattagcatcttctcaatgtagccagagctttgtacttccattctaaagtccctttatcattgtggggagattgtgttaccactacaacctttctcatcaacggaactccttcatcattactaaaacacaactcaccattcaacattttgttcaataaggaatcagaatatcatgccttgaggagttttgggtg

SEQ ID NO: 13376 - DNA, 417 bp, Glycine max
  unsure at all n locations
agctttggatcttngggagtgcaganaagaatactatgatgttcatgaactacctttaaatccaacagtggctcagatgaagaatcacagagagaggaagaccaaaaaggctaaggctaaaaatttccttttctctgttgtgtcaaaaattatttttacaagaattatgaacttcaaatctaccaaacagatttgggattatgtcagatcaaaatatcaaggttgtgaaagaaccaaaggcatgcaagtacttaacttgggcaaagaattcgagatttaaagcatgaaagagactgaaacaattaaaggctacgttgaccaactgttatgcatagcaaatagagtgaggcttcttgggaaggactntcctgatgaaagaatagtgcanaaaatcttggtcactatactcaagaagta

SEQ ID NO: 13377 - DNA, 486 bp, Glycine max
  unsure at all n locations
taataaatctatatatggtttaaaacaagccttccatcagtggtaccttatgtttcatgggataattcattcatttggttttgatgaaaacctcatggatcaatgcatataccacaaggttagtgagagtaaaatatgttttcttgtttatatgttgatgatattttacttgcaggcaatgatcggnggttagctacatgaggtgaaataatttctctctaagaatnttgacatgaaggatatgggtgatgcatcgttgtcattgacattaagattcatagagatagacctcgaggtattttatgtttttcatatgaaacctatattaacaaaattctagagagatttcggatgaaagattgttcacctagtgttgctgccattgtgaaaggtgataggtttaatttgaaccaatgtccanagaatgactttgagaaggaacagattgaaaacattccttatgcttagttgttggaagcctcatgt

SEQ ID NO: 13378 - DNA, 359 bp, Glycine max
taaaacaatccataatcaattgtacccttcaagttacgaagaattcttcttgcggcttttagatgaggagaggtatgagcctccgtatagcgacacacaacttccaccgcatatagaatatcgggccttgtattggttagataccttaaactccccacaagactcttgaagaccatggagtctaccttctctccttcatcaaactttgataacttcaagccaccttccatatgtgtgttcacgggattgcaatcaagcatactaaatttcttcaacacttcttttgtgtagcttccttgtgagacaaagataccattctccatttgcttcacttccatttccaagtaatatgacatgag

SEQ ID NO: 13379 - DNA, 368 bp, Glycine max
  unsure at all n locations
acattcaatttcgagcctctcgatatattacgggactcaattaaacatccgagagaaacgttattgtcgtttcaatttgctcagaggctcaacattcaatttcgagcgtctcgatatattacgggactcaatcagacatccgaggaaaatgttattgtcgtttgaattggctcagaggttcaacattcaatttcgagcgtctcgatatgttacgggactcaatcagacatccgagtaaaaagcaattgtcgtttgaattggctcagagattaaacattcaatttcgagcgtctcgatatattacgggactcactcagacatccgagntaaaagttattgtcgtttgaatttgctcagaaggtcaacat

SEQ ID NO: 13380 - DNA, 474 bp, Glycine max
  unsure at all n locations
agagactnttcaagctatntatcttctatctcatataagctctctaactntntagttttctcactctaagaagtggattcactcttgtcttggatggttatgaatgaaagctcctaccattatttatactactccacttccacaatgaatggtggagattacttgtatcctaaggtgaatattaattctctagaatgctttgcacattctagtagtttctacaattttctatttccttccatatcctttcatactcttctataagattctagaaggtttcacacatctccataatagttcagaggtttccacatttttccataagtttctaaagaattctacaccactctagagttcttcagaacattctagaanattcaacattctnttagaaaagtttataaatttcttgaacctatgtgatttagaatatanaanaaattatagcacccaanaacaatttttaggaatata

SEQ ID NO: 13381 - DNA, 450 bp, Glycine max
  unsure at all n locations
ttgcaatgttccaattgtcttttaaatggtgtgatcgattacaatatattggtaattgattaccagtgtatctgaacgttgaaattcaaattcaattgtgaagagtcacatcttttcataaaatgctttgtgtaatcgattacatggttttggtaatcgattaccagtgacaagttttgaataaagatcaagagatgtaactcttccaatggttttctcaagattttctcaaggttataactcttccaatggttttctcttccaatggtgccatcattttcttctattttctaaaccttttttgcaccatattaattactgattggtcttaattgtcaattaatcacgcagatttattatttgggctcatgtagctaatatgatgttttaatctaatttcaggaattaatganacattgcgcttaatccggatcttggttatgggcttga

SEQ ID NO: 13382 - DNA, 376 bp, Glycine max
  unsure at all n locations
caacctccgttggagttgtcggntgtagccactccatatccgactccaccttgttcggatccattgcaaccccgtctttataaatcacgtgtcccaagaactgcactttctccaaccaaaattcacatttcgacaatttggcgaacaatttcctatccctcaggatacgcagcacaatcctcaagtgcttctaatgctcctccttattccttgaatacactatgatatcatcaatgaacacaaccacaaactgatccaagtaatcatggaatatagggtggatgatagacgaacagttctaggcaatcaatttgtggggctccacactctatggtggaggacgcatgaacagcgctacgcaatcaattcatgggac

SEQ ID NO: 13383 - DNA, 491 bp, Glycine max
  unsure at all n locations
aagcttaagaaccatcctcgatacatattggtgaatcttataagggtacaactagacattctcttaaagacttatgcaataatatggattttgtatctatgattgaacctaataatataaaagaagccataatagatgataactggatcattgccatgcaagaagaattgaaccaatttgaaagaaacaatgtgtggaaattagtagaaaaacctgaaaattatcctgtcatatgaacaaaatgggtttttagaaataaattagatgaacatggtataattattagaaataaagccaggttagtagcaaaagggtataatcaagaagaacgtatagactatgaagaaacatatgctcctgttgcangattagaagccattagaatgctctcggcatatgcatccataatggattttaaactntatctaatggatgttaagagtgctcttctatatggagtaattcacgaagaggtatatgtcgaacaaccc

SEQ ID NO: 13384 - DNA, 474 bp, Glycine max
  unsure at all n locations
gtattcaaattggctnttggaagtgccttggtcagaatgtcagcactttgatgctctgttntgtagtacagtaacttcacttctccttccctttgaacttctcttagaagaaaaatctttatcttgaaatgcttagttttgccgtgaaacactagatcattagcaattgatattgcagcctggttgtccacaaaaatctgtgtgctttcttcttgtttcatatgcaaatctgtcataattttcctgatccaaagagcttgattcactacaacaacagcagctacatactctgcttctgcagttgattgagctacaacttcttgctttttagaacaccaagaaaagactccagaaccaaatgataaacaataaccagaggtgcttctcatgtcatcaatacaacctgcccagtcactatcataatatccatggagcttannaatatgagaatgagagtacattataccatagtct

SEQ ID NO: 13385 - DNA, 474 bp, Glycine max
  unsure at all n locations
agctttgngatgtanaagccttccatgccattttacaccaccaatactttctcgggtatcatagattnttggctattctctattaatctgtttcaaaaaatatcacataataagacttggaataaaattaaattctgtaaaatagaagaaaaaggaagcaacaaactaatactacatactcgatatttgacttgtatgtttgtgatgctggtaatttacaattgaattntcccttgcaatctggacaatagtaatctgtattttccagatcctgtaaccacgagtctgacctttatcataatccacttcatgaaagagagaaatctaaaaataaataaataaatagtgtcatcatgtntaagcatgatacagcaccttgaaaactttgctggatattntatcgcactcagcatgcacccacacattacaaccatcacaacacacctgatacaaagagttcattaccacaatatg

SEQ ID NO: 13386 - DNA, 410 bp, Glycine max
  unsure at all n locations
cgacaataactntatactcggttgtcttactgagtcgcgtaatatattgagacactcaaaattgattatcgaagctctgagcaaattcaaacgacagtaactttttactcggatgtctgattgactcccgtaatatatagagacgctcgaaatggaataccgaagctctgagataattcaaacgacatatactttttactctgatgtctgattcagtcccgtaatatatcgaaacgctcgatattgaatgttgatgctctgagaaacttcaaactacagtaactttntactcggatgtctgattcaggcccgtaatatatcgaaacgctcgatattgaatgttgaagctttgagtaccttcaaacaataataactttttactcggatgtctgattgacacctgtaatata

SEQ ID NO: 13387 - DNA, 271 bp, Glycine max
  unsure at all n locations
aaccttctggtggggtcttatagatgtcttcctctaaattcccatgcaagaatgcagatttaacatctagctgctccaagtaaagattctctgcagcaacaatactcagaataactctgatggtagttatctttacaactggaaaggagtctctgagatatcaattcccctgttctactgaaaccctttcaccacaagactcgccttgtatcttcttctaccgtcagattcttcctttagcctacagacccacctatnttgtgacgctttc

SEQ ID NO: 13388 - DNA, 334 bp, Glycine max
  unsure at all n locations
cactgaagaggaagacaaaattatctgcactctatatgacaccatcggaagcaggcaagtccattattnttttttttttatatatatgaacgtattgaatatgtgaatatgcattgcttttgcattattattgctatatatctgagtaatgtgatggttttgcctctaggaggtgctttatatcatgtaaactttccgggagaacatacaatgatgtgaagaatcactggaacacccagctaaagagaaagctcttggcaagaaacacatgtagtactggtgccacgacaagcaacaacaatgtcactttgagcaatactaaatattgtgatca

SEQ ID NO: 13389 - DNA, 398 bp, Glycine max
gcttcatgagagagtcaaagatcaaattgatatgaaaaataaaagttatgctaaacaagccaacaaagggagaaagaaggttgtcttcaaacccggagattgggtttgggtgcacatgagaaaagaaaggtttccggaacaaaggaaaacaaagcttcaaccaaggggagatggaccatttcaagtgcttgaaagaatcaatgacaacgcttacaaagttgagctgcccggtgagtataatgttagttccaccttcaatgtctctgatttatctctttttgatgcagatggagaatccgatttgaggacaaatccttctcaagagggagagaatgatgaggacatgaccaagagcaagggcaaggatccacttgaaggacttggaggacctatgacaa

SEQ ID NO: 13390 - DNA, 436 bp, Glycine max
ctcagcttcacattcaatttcgagcgtctcgatgtatcacgggactctatcagacatccgagtaaaaagttatcgtcgtatgaatttgctcagagcttcagaattcaatttcgatcgtctcgatatattacgggactcaatcagacatctgagtaaaaaagttattgtcgtttgaatttgctgagagcttcaacattcaatttcgagcgtctcgatgtatcacgggactcaatcagacatccgagtaaaaagttattgtcgttcgaattagctctgagcttcagaattcaatttcgagcgtctcaatagattacgggactcaatcagacatccgagcaaaaagttattgtcgtttgaattagctcagagcttcagaattcaatttcgatcgtctcgttatattacgggactcaatcagacatctgagtaaagaagt

SEQ ID NO: 13391 - DNA, 392 bp, Glycine max
  unsure at all n locations
ttatatgcacatgtatgttttcacttctcatcactctagtttttcctgttagattattgagatcaaccttagaagctggaatttcaagattagtttactttcaaaagagtaccagcatacctgcaagtcaacaggtttgatgctgtgggaatcagctcggttgatggcttctgtccttgcagaaaatcccaacattgttgctggaaaaagggtcttggagttggggtgcggcagtgggggaatctgctccatgattgctgttagagatgctgatctagtagttgcaactgatggagatggctntgcactngatctcctgaccaaaaatgttgcatccaacattgagccatcattactgactaaactcaccacaaaaaaactggagtggggaa

SEQ ID NO: 13392 - DNA, 489 bp, Glycine max
  unsure at all n locations
ctcagcttgaagcaacgttgttgaatttaagttgcttgagagtggatgcttacattccattccattcgagttgcacctataactaatatntttgtttgaatttacagattctatttcgattttaacatgacttatgtgggagcagggatgatttgcccccacctagtgaatntgtctttgctccttggagctgttctatcttttggagtggtatggccgctcattgatcttcgtaagggagattggttcccgaccaatttagatgagagcagcatgaaagccttgtatggctacaaggtcttcctgacagttgctctcatcctcggtgatggcttatacaactttgtcaagattctagtttcctcaatccttagcgtacatgananaattaagaaccgtaaaaatggtaagaaaaggattcagaacttgccattctcgaggtcatatnntggtatgaaatattacattcaattcacatataatttggct

SEQ ID NO: 13393 - DNA, 389 bp, Glycine max
  unsure at all n locations
agctntaggtcttanaatgtcagtcatgtcaattatgaaagcatgttaggtcctcttttccaaagagaactgaaatangatgtaaatctactttttccactattcactctgatatttggggtccaagctgtgtcacatcttttggtttcagatattttgttacctttattgatgaatactctagatgtacttggctntatttaatgaaagatcgatatgaactttaacctatattcatgtctttcattaatgaaatcaagacccagtttttaaaagtaattaagattctcaggagtgataatgctaaagaatatttctcctttaatctcttttcgttttaaccacacaaggcattttacattagtccacatgtcctcacataccacaac

SEQ ID NO: 13394 - DNA, 280 bp, Glycine max
tcatcaagctgtgcttcaatccagtccattaggtattctacatatgttggagcagaaacctcaataggtgtcttaatatgtacaccatctgcccatctatattcatacctaaagttgtcgtgcaaaaagacaagaccacataagagctacgaatgtataaatatttagcacagatggatctagaattctcattggcattaaaggaatgattatataacacacacatgccagatggatccagaaagggagtgcaaaagtaactcgttactaaatattgtct

SEQ ID NO: 13395 - DNA, 185 bp, Glycine max
  unsure at all n locations
agcttgcaaggtttctatactctaagcaagtttacactgagttcaggagcaccattgctatcaggattcatcatatagaaagcttccgagtctctggacccaacaattctctcaaacttggccctcatgtacatgatttcaccctctgaccctgcttcagctncactattattattggtattatt

SEQ ID NO: 13396 - DNA, 455 bp, Glycine max
  unsure at all n locations
ngatgcctctctgtataaccctntntacttttgggatctttccaatatcttctagcatcaagtcaagacaatgtgctacacatggagtccaaaatatattttgtctcgtgacttgtgaaattctacctaaaaagaccaaaatcaataaacttgtatgagtagtgtaacaattaaaagttataactactaaaaaaaacttcattaagtatgattgaattctcacccgccaacacataattacttccattgtccgtcaccacttgaataacattcttttctccaatctcctcaacaaagctatccaaaagctcaaagatcttctgaccagtcttcatgtattcagaagcatccacactcctcacaaattgtgttcccaacgaacaatntaccanaaagttaatcaaagttctattcttcctattcgtccaaccatctgacataattgaacacccata

SEQ ID NO: 13397 - DNA, 351 bp, Glycine max
agcatgcaagtttactaatacaagatcatacctcttcttatattctactctgtatagatcagtagttggagctcttcaatactctctactataaccagacctacacttagttatgctgtagacaaagtctgtcaattcatggtcaatcctattgaatctcactggacagcagtgaatagaattctcaggtatatcaaaggctgcttacaccatggcctacttctgaaagctgctacttctggaattcacattcccagtaatgccctttgtgatgcagactgagcttctgaccctgatgatcacagatctactacaggaggtgctatttattctggccttaatcatatatct

SEQ ID NO: 13398 - DNA, 341 bp, Glycine max
  unsure at all n locations
gcttactataacaagagcagacctcttctcttatcctactctgtatagaacagcagatggagctcttcaatactctccactataaccagacctagactaagttgtgctgtaaacaaaatctgnctattcatggccaatcctcttgaatctcactggacagcagtgaaaagaattctcaggtatctcaaaggctctttacaccatggcctacttctcaaagctgctactcctggaattcccattcncagtaaagccctttgtgatgcagactgngcttctgaccctgatgatcacagatctacttcaggagttgcctattatttggccttaatcatatatct

SEQ ID NO: 13399 - DNA, 314 bp, Glycine max
  unsure at all n locations
cctcataaatagaaggaggaaactttgcnttttcaaatgcgtcatttaacaaatacaatatcatagtcattgccttgtcgcttaatccacacaaaacttttatatgatataatttgattataaattctagttttgtgtactcgcttccttcatacaatgtttggctcccatcatttagaagctcataaaagacattatgatcttctcttggttcatcatttactatttcatcttcatttaatggttgtgatgcacctacattatggtcatgttgcctatattgttcaaatgcgtcattgatcatcatatccatt

SEQ ID NO: 13400 - DNA, 336 bp, Glycine max
  unsure at all n locations
ttagtactgttgacgccattggaaacaggtcgtgcgactagattatttcggtgtctaatggtgtattcaattcaagaaagaggatactacaagccgtactataatgtgcagatggtattgatgaggcttgcctcagatttgatgaagcagttggccaaatggagaaacagcaacagcaagatgtagatgcacttcaagtttcaaaagatgggactgagaagaaagattatcctgttgatctctctcttccagatataaaaaatgggatatatagctcagatgagtntaggatgtatacattcaaagttaggccttgctcaagagcttattctcatg

SEQ ID NO: 13401 - DNA, 280 bp, Glycine max
actcagcttgtgcaacctcagacgcgaatcttccattctgttctgcctgaatgaacagacacacatagtcacattccatttccatgtctgcgtcatgcggagtggtggagtgtgtgttcgtgctgggctgcgcgcggtggctgtggaagcgctgcacctacgtgggcagctactacagcgccacgtggtcctccgccaccgccgacgagttcgacccggacccacgcgtctgccgcctcatcctcgccaactacgagcccgatctccgtacccccaacca

SEQ ID NO: 13402 - DNA, 428 bp, Glycine max
  unsure at all n locations
agtctcacaattgtcacgtgctcatgcataaattgttagtcgtggctatacgagacatcttgccaaacaaagtcaggttagccataactcgcctgtgctttttcttccatgctatatgtagcaaagtcattgatcctgtcaagtttgatgagctggaaaatgaggccgcaattatactatgccagttggagatgtattttccccctgctttctttgacatcatgattctcttgattgtgcatctggtcagagaaatcaaatgttgtggtcctgtttatctacngtggatgtacccagttgagcgattcatgaagatctttaaaggatatacaaagaatctatatcatccagaagcatctattgttgagaggtacattgcagaaaaagccattgaattntgtcagaatacattcagaaggctaaacatg

SEQ ID NO: 13403 - DNA, 367 bp, Glycine max
tctacattcaatttcgagcgtctcgatatgttacgggactctatcagacatccgagtaaaaagatattgtcgtttgaatttgctcagagcatcaacattcaatttcgagcatctagatatgtgacgggactgaatcagacatccgagtaaagatttattgtcgtttgaatttgctcagagcatcaacaatcaagttcgagcgtctcgatatattacgggactcaatcagacatccgagtaaaaagttattgtcgcttgaattggctgagagcttcaacattcaatttcgagcgtctcgatatgtgacgggactgaatcagacatgcgagtaaaagatattgtcgtttgaattgctcaagcatcacat

SEQ ID NO: 13404 - DNA, 314 bp, Glycine max
  unsure at all n locations
tgtatctccttgtcagagtagctctgtcccgaatacacaactctgaaaacatcatcattgctcaagaggtgtttaattccatgaggagcaaganaaggaaggtgggttggatgactataaagattgatttanaagaggcttatgatagattgagttggtctttcatccaagatattcttattgatattgggctttcgacgagttttgttgagctagtgtggtattgcatatcttcccctacaatgaaggtgttgcaaaatggcaaagcattagaggaatttttacaagctatgggaatttgcaaggtgattcat

SEQ ID NO: 13405 - DNA, 473 bp, Glycine max
  unsure at all n locations
tagatggagaagaagagagtgcgagcaaaatagggctcgcgttctatatattttaaatgtaagtccaacatcggttttcaatacaaaaccaatgttaatcaaatgatgttaacattaacattggttttctggaagaaaccgatgttaacttatcatacgttaacatcggttgtctgaanaaccgatgttaaagaattgacgttaacattggttcttgaaaacccgatgttaatgaactgacgttaacatcggttcttgaaaaccgatgttaatgaatacacattattaacaattatgccaccgagtttatgttctcatcggctttgtcaaaaaccgatgttaatctgatgatgttaaatctacattttcaagtagtgccaacaaccaaatagaaaaaatcatatatatatatatatatatatatatatatatatatatatatagatatatcaaaagagatacattagagtatg

SEQ ID NO: 13406 - DNA, 293 bp, Glycine max
caatacttggagactcatgcctcttcctccttcaaaacagctatcggatgtcgctggatatataagatcaaatatcgagccgatgggtccatagaaagatacaaagcacgcctggttgccaagggttacactcaaacggaggggttggactaccttgacaccttttctccggtagcaaaactcacctccgtacgagttcttctagctttggccgcactcaacaaatggcacctgcggcaactggacgtcaacaacgcgtttctccatggtgaccttgaagaaaggtatatatg

SEQ ID NO: 13407 - DNA, 429 bp, Glycine max
  unsure at all n locations
ctcagcttataatatgaatctaattaatgtgctagatataaataacttttctaagtgtcctatatgtgtggaagctaagtatgcaaagaagccttttaaacctgtcaaaaatagaactacggaactgcttgaattaattcacacggatttggctgacttcaaaacacagtaagtagaggaggtaaagcatattttattacttttatagatgatttttctagatatgccaaagtttatcttctaaggacaaaagatgaggctgaagaaatgtttttaaaacataaggcagaagttgaacaccaattagatcgtaaaattaaaagacttaagtctgataggggtggtgaatatggcaactattttcttgagaatnttgtgaaaagatgggaatatcatgaaatagtgcccctatactctcaacaaatggat

SEQ ID NO: 13408 - DNA, 419 bp, Glycine max
  unsure at all n locations
nttacatgaactcacgataacacatttgcaagagcatcggtctgccgacagcgaagccggtgtgggcgatgttagatnttgcacttccaggaatgtgtgattntcaatttgggtacaaaaggattangcgaatgaaactgtttntgtcangaacaatattgcattgctgcttccactttagaaattaattntgtagcttattttttgttctttaatcaaaatagtgtgtcaattcttactttatctttattntctattattaaatattatactaaaatggaattttattntattattttttaatatgtgatttaaatttattattctttaattgagatancnttattttacttntaaaaatcttaaatttaatctctatattttagtgaacatttacttttactttaaaaattatattt

SEQ ID NO: 13409 - DNA, 364 bp, Glycine max
  unsure at all n locations
ctattgactaatattttttgtaatacttaataaaaatattgttaaaagtctttgatcacattcaaaaaaatattatcaaattatgaataaatatcactaatatatgtttatgacattctatcaaatgttatatatagtttatgttgttaaagcttaaaaatatcataaaaaaactttaataatatacgtaacatttgataaatattataaaatatattaacaacatttattcataattgtgtgacattnttttgaatgtcgtcaaaagttttagtaacatttttattaaatgttagataaaaaaaaaatattgctaaagatcatgtttgtagtagtgcctggaagtatgttgctttctgcactt

SEQ ID NO: 13410 - DNA, 446 bp, Glycine max
  unsure at all n locations
ctctcgagaaatgtaaatggtcatcataacttgtcacacggaagtccgattcaggcgcatactatatcgagacgctcgaaatctaaccacggacgctctctagaaattcaaatggtcataacttttagcacgaaagaccgactcaattgcataatatatcgagacactcgaaattaaacaccgaaagctctcgagaaattcaaatgatcataactttntacacgtaggtcagattcagacctataatatatcgagatgctcgaaactgaacaacgaaagctctcgagaaattcaaatggtcataacttgtaacaaataagtacgaattatgcgcataatataatgagacgctcgaaatttaacaatggaacgtctcgagaaattcnaatggtcatcacttttcacatggaggtcacaatgagacgcatcacatttcgagacgctca

SEQ ID NO: 13411 - DNA, 443 bp, Glycine max
  unsure at all n locations
ctcagcttgtatttgttttcaaatgaggtggtggaagttatatatggtttttaagacaacctaataggtgcattataaaaaaagaagacgatctattaggtcatgtatagctacngcaaagtgtaacgatgagttattntgttgagatgtgaacacgcaaaaagaacaattttcgtacgttggatgactaatgttgtatgctagttgtagtgttgtattgaatactttaataaatgaagttataaatcactataaatatctataatctatagaatatttccaatgatgattgtcttagtgagtagagtttcttaaattatatatttagtctctatagtattttttgcggtgctcatagtgttatgttattatcaacaacttatacctatatttactctaatgataagatacttctagaaaattactgttatatccttttattt

SEQ ID NO: 13412 - DNA, 378 bp, Glycine max
tctagactgtatacaagaatgaagctctgataccacttgctttacaagtggcctcagatatcttatgataaggggttgaattaagatatcacaatcttttatatattaaaattctattgtgattttaacccaaatcccaagatttctttcaaaaattgaactcctaaataattatgcaaattaatcttactgaatagacataataagcaataagcaataaacaataaaagagtttaagggaagatagattgcaaactcagatttatactggttcggccacacctttgtgtctatgttcagtccccaagcaacccccttgagagttccactatcttgcaaaatccctttacaagttctgaagcacacaaagacaaccct

SEQ ID NO: 13413 - DNA, 337 bp, Glycine max
  unsure at all n locations
tatgactcggtttcttagggattcctaaactatatgatgatgaggatgggattttgtgaaagatggggaaaatggatccatggatgcctttctagtgcaactatatcaattttgatcaatggcagcactactagagaatttgtgcctgagaggggactgaggcaagtagatccccttgcacctttcctatttaatatagcagctgagggactcactggtttgatgaggacaactgtctccaaaaaccttttcagcagctataaagtggggaggcaaaaggaggagattaacatcttgcagtatgcagatgatacactatnntttggaactgcaacta

SEQ ID NO: 13414 - DNA, 370 bp, Glycine max
  unsure at all n locations
catcatttcaatttctcattaagtaaaatggatcattntcaaggtccaacgccttataatgatcacctcttaagtaaaaaaaagagtcgcttgataagcaagaactacgtaggtctgatttcctcatcgcaattgaggatacgtaggagcaaaagccccgcttttgtcgaccaccccaagagatcgttaatggtccaatgccttaacgtttctctcctttcaaaaacaagagatcgttaatggcccaacgccttaacgtttctcccctttcaaaatcaaaagaccgtttaatggttcaacaccttanatgaccttctgttcaataataacatattgtgcaaaagaagataaaaacaacttaaccaaacac

SEQ ID NO: 13415 - DNA, 439 bp, Glycine max
  unsure at all n locations
tgaagacaagactatacgaggtatcttccttgggtatagcaatatctctaagggctaccgtgtctacaacttgcaaactaagaaactcgtcatcagtcgagatgtggaagttgatgaatatgcttcttggaattgggatgaagaanaagtggagaagaaggttcttatacccgctcaactacctcaagaagaagctgaggaagaagacccaggtgaaccaccttcacctccaccacaacaacaagatcaagaactatcatcaccagagtctactccaagacgagtaagatctttggtggacatatatganacctgtaacttggccatacttgaacctggaagccttgaagaagcgtcanagcaggaagtatgggtcaaggcaatggaagaagagatgcagatgatcgagaaanacaacacatgggagttagtanatcgt

SEQ ID NO: 13416 - DNA, 277 bp, Glycine max
  unsure at all n locations
cttctcttctgactcatgatgtanatccatgtcattcttgtattgtcatcaattatggacataaaatacatccaccacctagagaagggactcttgcaagcccccaacagtcatcatgaatataatcaagagttcctttggtggtgtgaattgctttaagaaatataatcctatgttgcttgccgaaaacacagagctcacagaatttcagttcatccaatttctgatttcccaacagctgctgtgtttgaagtattatcatacccttttcactcat

SEQ ID NO: 13417 - DNA, 387 bp, Glycine max
  unsure at all n locations
actagatgcctgggttaacctggtaacccagctgggcttgaataaaaaatctcacctgtcgccagactctgtggtttatgctcctctgccgaccaccacacagacctttgcccttctgtgcaacaatctgaagcaattgaacagcctgaagcttatgtgtcaaacatctacaatagacctcttcaacctcagcagcaaatcagccacaacagaacaattatgacctctccagcaacaggtacaatcccgggtggaggaatcatgccaaccttagatggttgagtccttcacaatagaagcaacaacaacagccttanttttagaatgttgttggcccaagcagaccatacgttccttcaccaatctagctagaacaacaacaacagc

SEQ ID NO: 13418 - DNA, 408 bp, Glycine max
  unsure at all n locations
agcttattcaaatattcggattaagcatatgtttagttttaaaaaaattaaataattattagctcttagaattttattaataaaggaaaatatgtaatttctattttaaaaatgttaaattaaatatgcactaaattgaatgaagaaaatatattcttaccattatttaaacaactttcacataacttcaaaaacttaactgcaagtataccttgatcaacaactagcttgtccgatatgttcaacaacattatcatacgtcataaacaaataaaatcactagaacacatataagggtaagctctctttactcaatgatgtctctcaagctagatgaataanaatgaaggtgatgggaatgagctccaagttctacacgaattttgcagcagcaacgctgcaaaagta

SEQ ID NO: 13419 - DNA, 485 bp, Glycine max
  unsure at all n locations
tagcccacaatgttctccaaatatggcttaagaacttggtatccctatcacttactatgctcctaggtaggccatggagtctcaccacttgcttgaaaaataagtcaactacatggcaagcatcatcaacctttttgaaacgtataaaatgcaccattgtttataacattgcaacaaccacaaaaacaaaatccttgccactctttgttctaggaaattgcaaaacaaagtccatagatatgtcaatccaaggaaaatcacgaactggcagaggatgatataaaccatatggcttcacttttgattntttatttttacaaacaaggcattatttatgtacatcatgtttcatatgagaccaataaaaatgctcatgcaatatttctaaggtcttttgcaccccagaatgccaccatcaaatcatcctcgtgtgcctcatttaccaacaaatctcttatggaacacttaggcacacacagtctttt

SEQ ID NO: 13420 - DNA, 458 bp, Glycine max
  unsure at all n locations
ccctctggttgctctgctagggtttccaagcattagagagaatgtgaagggattataatctcaatttcactatctttgtgcgagaggaatttctctctctacagacattattttgcaaatcccaacaataggaatgtgcaaaaatgagttttgaaggtggtgtccaaatttcaggatgattcaatggttaacaagtctaggatcatagttttattgcgatagatttgcgtgtatgcggtaaaaagagagagtttttggagatgaagaagggagaacaattttgaaagagagctctattttactccctattgaaataaataaacaaaacatcctttntattttctaaaaacatatttattntatttaccttanaaccattattttaattaataaaactatgcatccttatttattttacaaaanatagggtgttactgggtagctaatatgcagatcaa

SEQ ID NO: 13421 - DNA, 472 bp, Glycine max
  unsure at all n locations
agcttcaagaatcaagatcaagattcatgactcaagattcaagaatcaagagaagacttaatcaagataagtatgaaaaggttntttcaaaaactgagtagcacatggatttttgtcaaaacatgtttaccaaagaatttttactctctggtaatcgattaccagattgttgtaatcgattaccagtagaaaaatgaatttgaaaaagttttcaaatgaatttataacgttccaattgatttcagaaagctgtaatcgattacaatgtgttggtaatcgattaccagtgcctttgaacgttgaaattcanattcaaatgtgaagagtcacatcctttcacatannagccttgtgtaatcgactacactgattnggtaatcgattaccagtgattgtntttgaataaataaaagatgaactnttanatggttttgacttttaaattgtttaagttttcttaagcatactctct

SEQ ID NO: 13422 - DNA, 452 bp, Glycine max
  unsure at all n locations
ngctaacccatggaagctcctaatatctcccacactntntgtggtgggccattcttggatgaccttgattttctcagggtccacttggaccccatttctaccaactacaaaccctaagaaaaatatattatctgcaccaaaaatacacttctctatatttgcatagagggtgtttttcctaaagactgaaagaacttgcctgagatgtcccaagtgatcatctaggctcctactgtacactaaaatatcatcaaaataaagaactacaaatctatctatgaaatcccttaagacatgatgcataagcctcataaaggtgcttggtgcattagtgagcccaaaaggcatcactagccattcatacaaaccaaacttggtcttgaaagcggttntccactcatcgccctttntcatcctgattnggtgataaccacttttaagaatcaattttg

SEQ ID NO: 13423 - DNA, 469 bp, Glycine max
  unsure at all n locations
cttgatccgcctctatattttccacaatcccatcctccctccagataatgagcttctggtgaagggtagatggcacagctccaactccatgaatccactcccttcctaatagcaagttaaaattagccttagactgtatcaccaggaaaagagttggtcgaactatactgcctacagcaacatctacttgaatggctcccaaagaatagccagttttaccctcataattcgaaagcacaatgttgtgggcagatagatcagtgtcatgtttcccgatcttgtagagcatagatcgaggcattaagttgacagccgctcctccatcaatgagcactntgttgattccaacattctcaacttttgctctgatgaaaagaggtttgagatgaattntcatctgaaaatctggctnttcgaaataagctaattgctcttccacacagccattattcataacatagtaacatac

SEQ ID NO: 13424 - DNA, 471 bp, Glycine max
agctagaagattcatttggattttgtgaacttggtatagtctaaagtcttatagttcggatctttaacctccaattgtgtttgtcaaagaatattttagagattaataaaaattgtgtagtcatttcaaaagcaggtgggataaattacaaatgttatgtgccaaagatactacttatccactttttgatatgatccaggttagcagagttgaaataggttatttatatttataatcacatatttatccttttttatggatttgaagagacttttaaaaagaaaatggaactttatggattctacattgttattaatatcacacataataacatacaacgatattcatagtcatattcttttaattttaacgtgaatttaattaattgaactattttttaaacatcataaacaaaatccatatcttttacattaattgaactacttttgaattgttactattcttctaaca

SEQ ID NO: 13425 - DNA, 407 bp, Glycine max
  unsure at all n locations
ggatccttaagcacctgcggctgcagctggagaaagctgagatgtttgtgtttacatgcctaactgacgcaatcctaccccgcaagggcattggatagaagactccaagtagattgggccagagatccaagggaaggccctagggttctcatgagccttagggtagattttgaccccatgggctaagtatgagcccgcttatctttgtaaatattagaatagggtttttccttcgtttaggccttgtattttggccattctagtagtataaggttttagccttgtatttcgaggcattttgagtagtctttgtagttgggaccttttttgtattttcatgtatnttgtcatgggggtgagcttagatattgtanggggcgtgtagcanagttctagcttctcatctc

SEQ ID NO: 13426 - DNA, 487 bp, Glycine max
  unsure at all n locations
ttgaatgctctattcaatggagttgacaagaatatcttcagactgatcaacacttgcacagtggccaaagatgcatgggagatcctgaaaaccactcatgaaggaacctccaaagtgaagatgtccagattgcaactattggctacaaaattcgaaaatctgaagatgaaggaggaagagtgtattcatgacttccacatgaacattcttgaaattgccaatgcctgcactgccttgngagagaggataacagatgaaaagctggtgagaaagatcctcagatccttgcctaagagatttgacatgaaagtcactgcaatagaggaggcccaagaacattgcaacatgagagtggatgaactcattggttcccttcaaacctttgagctangactctcggatagggctgaaaagaagagcaagaatctggcgttcgtgtcanatgatgaaggagaagaaggtgagtatgaccttgatactgatgaag

SEQ ID NO: 13427 - DNA, 430 bp, Glycine max
accttgctaattcaattaggaattcccttcctaatattctagtgatcatcttgatgttgtgacttgtaatcttgaagtattgtcttgaattttaatcttgaaaagcccatttgcatcaattgcaacacatcatcatgatcatcatcaaaacatcaaagccaattgcatctacacatgtgtcctccaccttcgagattggagctatgtttcacgattgcctaagtgcggaccctcaaggcaatccgccattctccctttttttttcggagacccatgaatgttattgcctagcgctattcatgtgccctccaccttcgaggttggagctatgtttcatgattgcctaagtgcggaccctcaaggcaatcctccattctccccctttttggagccccatgaatgtcactgtctaacactgttcacgtgtcct

SEQ ID NO: 13428 - DNA, 457 bp, Glycine max
agcttcattgagaaaacttccttgagaagctaatgcttatctacacacacccctctcataactaagctcacctccttgaaaagtttccttaagaagattcctaaagaagctagagcttaactacacatacctctctaatagctaagctcacctccttgagatgagaagctagaacttagctacacaccccctataatagctaagctcacccccatgacaaaaaacatgagaatacaaaaaaaaagtccttactacaaagactactcaaaatgccccgaaatacaaggctaaaaccctatactactagaatggccaaaatacaaggcccaaatgaaggaaaaacctattctaatatttacaaagataagtaggctcatacttagcccatgggctcgaaatctaccctaaggctcatgagaaccctacggccttcccttggatttctagcccaatctac

SEQ ID NO: 13429 - DNA, 320 bp, Glycine max
gactcttgtaagttggcacttggatacatctttgtgatagttaacagagcaatatcttggagaagagctaaacaatcattagttgccacctcaactatggaagcagagcttgtctcattatttgaggcatcatctcaaagggtatttggttgaaacaattcattgttggtctacaaatagttgatttcatatatagaccattgaagatatattgtgataataaagctgctatttttctggctaaaaacagtaaaagtggaagcaaagcaagcatattgtggaaacaaaagaaatcattactcaacaataaattaatgatt

SEQ ID NO: 13430 - DNA, 409 bp, Glycine max
  unsure at all n locations
nttaaaagatatttactctgtggtaatcgattactagtgactgtaatcgattaccaatggccaaaatgcttattagaatgctctaaaatgtttaatattttttaaagtttgtaattgattacacaaggcttgtaatcgattatcagaagttnttgaacattttaaaacaacttttagaaatttgaatttaaatttcaaagcctgtaatcgattacagagtgtatgtaatcgattattagagttaatattcaaatttcaaatgtgaaaagtcacaactcttcagaatacaactgtgtaatcgattacatcattctggtaatcgattaccagtgaggaattttctaaaataattcctaacagtgattttgaatggccatcaatacatangtgacttgggacacaaattttc

SEQ ID NO: 13431 - DNA, 422 bp, Glycine max
  unsure at all n locations
acgacaataactntatacaaggatttccgattgagtcccgtaatatatcgagacgctccacattgaaaatggaaactcgtagcaaatttgaacgacaataactntttactcggatgtccgattcagccctgtcatatatcgagatggtccagattgaaaacgcatgcttgtacaaaattcaaaatacaataacttttcactcggatgtccgattgagtcccgtaatatatcgagatgctccaaattcaaaacggtagctcgtagcaaattcaaacgacaataactttttacttggatgtgcgattgagtcccgttatcgagacactcgaaattgaaaacggatgttcatagcagattcatatgacaataactttatactcggatgtgctattgagtcgtcgcctatatagagatgctcccaa

SEQ ID NO: 13432 - DNA, 472 bp, Glycine max
  unsure at all n locations
catgcaagcttcttcacatagaccgcctttgctcgaccttctttatgactaaaaacagacacattatgcataagcaaaagatcaagaggagttagtggattaaaaccataaacaacttcaataggagaacaattagtggtgccatgaacagttctatggtaagctaattcaacatggggtaaacaagcttcccaagtttttaagttatacctcaaaactggcctaagcatagttcccaaagtcctattaacaacttccgttagccatcggtttgcgggtgacaagtggttgaaaataacaatatagtgcccaacttgctccacaaagtcctccataaatgcaaatcatcatgcctaggtataggatgcctatatttaatggtgatgttataagggctctacaatcagaacacatgcgccatgtcccattcttnttagggaccaaatcactgggacagcacatggactcatac

SEQ ID NO: 13433 - DNA, 485 bp, Glycine max
  unsure at all n locations
agcttctatagaaggttngttcctaatttctctacaattgcctcacctctcaatgagctggtaaagaagcatgtggcatttacctgnggtgaaaaacaagagcaatcctttgctttgctcaaagaaaagctaactaaggcacctgttctagctcttcctgacttttctaaaactntttagctagaatgtgatgcctccagagtgggagttggagctgttttgttacaaggtgggcactctattgcttattttagtgaaaaacttcatggtgccacccttaactacccctcctatgataaagagttttatgccttaataagagcactctgaacttgggaacattaccttgtatcctaagaatttttcattcatagtgatcatcaatcacttaagttcattagagggcaaagcaagttaaacaaaaggcatgcaanatgggtagagtacctagagcaatttcatatgttataaatacaaaagggaaa

SEQ ID NO: 13434 - DNA, 419 bp, Glycine max
  unsure at all n locations
tattacggacactataaaactcagcttcacattcataccgagcgtctcgatatactacgggactcaatcagacatccgagtaaaaagttattgtcgtttgaatttgctcagagcttcggcattcaagtccgagcgtctcaatatattacgggtctcaatcagacaaccgagtaaaaagttattgtcgtttgaatttgcttagagcttcggtattcaatttcgagagtttcgatatattacgggattgaatcagacattcgagtaaaaagttattgtcgtttgaatttgcacagaacttcggtattccattntgagcaactcgatatattacggtactcaatctgacatccgagtaacaaggtattgtcgtctgtaattgctcagagacttgataatcaatttcgagcgtctcgatatgt

SEQ ID NO: 13435 - DNA, 406 bp, Glycine max
  unsure at all n locations
agcnttgagtaccttcatacaacaataactntntactcggatgtctgattgacacctgtaatatatccagacgctcgaaattgaataccgaagctctgagcaaattcaaacgacaataagtntctactcgtatgttcgattgactctggtaatatatcgaaacgctcgaaattgaagaccgaaggtctgagcaaattcaaacagcaataactttttactcggatgtttgattgagtcccgtagtatatcgagacgctcggacttgaatgccgaagctctgcgcacattcaaacgacaataacttttttcctcggatgtctgattgagtcccgtaatatatcgagacgctcggacttgaatgccttagctctgagcaaatccaaatgacaataacattttactcgga

SEQ ID NO: 13436 - DNA, 366 bp, Glycine max
tatatctgatcgccatagtgatacattcaaaaaagatatcctgtgcatcttcccgatcaaagtatcgcccatcaccatccaacaccaacaagccattcttcgaatcctcgggaggcaatgaattatacagggcctacagatgcacagaattctcacttacaaagcaaatgcataattcatgcaatcatacattgcatggaaatctacaaacctgtatccaatttgcgagagaaaagacttgcataaacactttcacctgcaaaacaaatatgcctataattaattatatggaaaatactactctcacacttccaacatggagctacacccgtcaatacttccttataactgtgtccaatgtgttac

SEQ ID NO: 13437 - DNA, 388 bp, Glycine max
tgtaaggttaaagtctcacgattgtcacgtgttgatgcaacaatggttagtcgtggctatacgagacatcttgccaaacaaagtcaagttagccataactcgcctgtgctttttcttccatgccatatgtagcaaagtcgttgatcctgtcaagtttgatgagttggaaaatgagaccgcaattatactatgccagttggagatgtattttccccctgctttctttgacatcatgattcacttgattgtgcatctggtcagagaaatcaaatgttgtggtcctgtttatttgcggtggatgtacccggttgagcgatacatgaagatcttaaaagggtatacaaagaatctatatcatccacaagcatctattgttgagaggtacatt

SEQ ID NO: 13438 - DNA, 365 bp, Glycine max
  unsure at all n locations
ggatccttaagcacctgcngctgcaagctgacaacgtcgtgaattttgtagtacattgtatcaactagaggctgntaaacaatccaatccagaaattagtgtgtcagtgagtgtagaataagagacagcgagaagagagaaagaggaaggatgtggaattactgtgctgccccagcggtcttgaggatcgacgtcggcgcctcgtctgagcagcaagccaactacgtcggtgcggccctggcatgcggcgacttggagcgcggtgcggccgtcaatgtcagtgaaattgacgtcactcccggcgtccaagagctccttaataccgtccgagtcgccttcgttggccaaatacattaaccggaccg

SEQ ID NO: 13439 - DNA, 325 bp, Glycine max
  unsure at all n locations
agcttgaatcggacatccgtgtgaatagttatgacgatttgaatttctcaagatcttccgttgntcaatttcgagcttctcgacatattatgcacccgaatcagatatccttgtgaaaagatatgactatttgaatttgccgagagcttccgatgtttaatttcgagcgtatcgatatattactagcttgaatcggacatccgtgtgaaaatttatgaccatttgaatttctacgagcttccgttgtcaaattccagcttctcgatatgtgatttgcctgaatcggacatccgcgcgaatagttatacccgttgaaattctcaag

SEQ ID NO: 13440 - DNA, 414 bp, Glycine max
  unsure at all n locations
nagcttancatcagacagagcttgaagtttctgctcccttgactttgcagcctgctcaacctttctcttgtacacatccaagcactcctgttctaactgaagaagcatcttgtctcgttgctcatcgctctcaccaacctcatcccatatttcctacagtgtataaagataatgtaattatctaatcccattattctgtagagcattctcatcttaagtgacaaagatgaatagctgaatgtagttagttacctgaagctttcttaacaaggaaccacatgtgttttctccaagaagaggattctgagcttcggtcactgccattgaagtcccagcgacacttaccctgcacctccaaaaacaaaaatgacatgaaaattttctctccttccaccaaacgaatagagaaacatc

SEQ ID NO: 13441 - DNA, 463 bp, Glycine max
  unsure at all n locations
gaatcaagattcaagaataatcaagtttcaagatttaatcaaatttcaagaatcaagattcaagaataatcaagataaagattcaagaatcaagagaagactcaatcaagataagtactaaaaacgtttttcaaaacattgagtagcacaagaatttttcacaaaatcgtttaccaaagagttttactctctggtaatcgattaccagaaggtagtaattgattactagtagccaacattgttttcaaaactgatttacaaagctataatcgattaccataatcatgtaatcaattaccaatgttntaaaacattagatttcaaatttcaagagtcacaattagtgttaaaacattntcaaatcatttttaacttgtgtaattgattacacaatacttggtaatcgataccagagtatctannacgtttgattntcannaattannatgaagagtcacatcta

SEQ ID NO: 13442 - DNA, 407 bp, Glycine max
  unsure at all n locations
agctngtgtagcgataattctagctgggaaaagtatttctcacctattacccagatgtcggtgcagcttgataatagtttcctcctcttccttggtgtagtttcctcttttgaggtttggccttaggtaattcagccaccttagtctgcaactctttccacatctcgcaagacctaacaaattaataacaacaacaacaaagtaaaaccaattacaatggattcatatatgatttagctataagctgtgcatgtatataattaaatattgaatatatggctcctacaaattcatgtagaagttaaaccaaaccttgaaaacagagaagaagaataattgaaagccacattggcgactatattgatggtacatactctcacatacttaatttgtttctgaccaaacta

SEQ ID NO: 13443 - DNA, 485 bp, Glycine max
ctttcgaagtccactgttgaaatcatagcacgcttctctctgtgaatagtttcatccaccacttcattgagaatcagaattccatggagaatgtgcctattttttatgaaggctatctgcctttcatcaattaactcatccagcagaatcctcaacctatttgccaagagttgtgctattactttatacatgcagccaatgagagagatgggcctgtgatcatttacagactgcggctgagatatcttatgaataagagccacttaagaggcattgctgcctctaggaaagcttccatgagcatggaattcatccacaaatcttcgaaaatcatgtttgagcagcccccacaactccttgataaatctaaaattaaaaccatctggccccgagcatttatcaccagcacaactccaaatagcatctctgatttctgaatcagagaaaggcgcagtcagctcctctctttgattatgatgaatcat

SEQ ID NO: 13444 - DNA, 354 bp, Glycine max
agcttctggtgggacatcatgacttgctatccattctgatattcaccacagattctgccttcttctattttcagattggtaatgcctctaacagcacctttgtcaatgattatcttcatgcctcttaagcgcagatgtccaaatctttgatgccatattttgacttcatcttctttggataatagacatgtggaggagcaactgtgttcttgaggtgttcatatgtgacacgagtccttagatctgctgcccttcaataggactttactcttttcattagcaccaagcattctgactttgcgaagattacattgaatccttcattacacaactgactgatgctgatcaagttct

SEQ ID NO: 13445 - DNA, 458 bp, Glycine max
gaatactactggacataatgggtttcctgtcattgatgatccacctttctcagattcaccagagctatgtggacttgtactgaggtctcatttactagtgttactgaaggagaagattctttcaagggataggggttttgcaaatcaaaggatcttccaaagaatttctactttggattttggacaggcgggatcacgaaacgggatcaaactacaggatcttgatatccaagaggaagagatggatatgtatgttgatctccatcccataactaatgcatctccttacactgtggctgagacaatgtcactagccaaagctgctattcttttccgacaacatggactcaagcacatgtgtgttgttccaaagaaccaatgggtatgatatcttttcttttccctcccacaaaatgatattatatactccttcactcgaatctgtcatatgcattctt

SEQ ID NO: 13446 - DNA, 419 bp, Glycine max
  unsure at all n locations
tgctcgcatcatcaactggagtggatctttattatacataacacacttagtttatgtgtcatccagtgaagctagattacccggtggtgacctttacctatccaaaggactaggactgagccctgatactcaacgagtcatgctctatcttgctggttgttcgggaagcgtggccggcttacgtgttgcgaaagacatagctgataacaaccctggaagccgagtgctgatcgctatctcagacactacaattattgtgttcaagccaccaagtgcagatagaccttatgatctagntggtgtggcactctatggggatggtgctggtgcaatgataattggctcatacccaatattggagtatgagaagcctgtctttgagcttcacactgcagttgacgaggttttgccgcacactg

SEQ ID NO: 13447 - DNA, 471 bp, Glycine max
  unsure at all n locations
ctaagcttaacatcagaccacttccagggtgctggaactacttcacatggacttgatggggcctatgcaagttgaaagccttggaggaaaaaggtatgcctatgttgttgtggatgatttctccagatttacctgngtcaactttatcagagagaaatcggacacctttgaagtattcaaggagttgagtctaagacttcaaagagaaaaagactgtgtcatcaagagaatcaggagtgaccatggcagagagtttgaaaacagcaagtttactgaattctgcacatctgaaggcatcactcatgagttctctgcagccattacaccacaacaaaatggcatagttgaaaggaaaaataggactttgcaagaagctgctanggtcatgcttcatgccaaagaacttccctataatctctgggctgaagccatgaacacagcatgctacatccacaacagagtcacacttag

SEQ ID NO: 13448 - DNA, 371 bp, Glycine max
  unsure at all n locations
agcntttgagcaattcanatggtctgaactnttcactcgtagctctgatttaggcacatcacatatatagacgctcgaaattgaacaacggaagctctcgagatattcaaatggtcataacttttaacttggaggtccgattcaggcacataatatatcgagacgcccgaaattcaacaacggaagcacttgagaaaatcaaatggtcattaattttaactcggaggtccgattcaggcgcatcacatatagagacgctcgaaattgaacaaaggaagctcttgagatattcaaatggtcattacttntcactcggaggtccgattcaggcacataatatatcgagacgcccgaaattgaactacggaagc

SEQ ID NO: 13449 - DNA, 445 bp, Glycine max
  unsure at all n locations
gcttacaatagagctgntcatagcaccactaattgttctccttttgaagatgtttatggttntaacccactaactcctcttgatcttttgcctatgcctaatgtttctgtttttaagcataaagaaggtcaagcaaaggcggactatgtgaagaagcttcatgagagagtcaaagatcaaattgagaggaagaataaaagctatgctaaacaagccaacaaagggagaaagaaggttgtcttcgaacccggagattgagtttgggtgcacatgaganaagaaaggtttccggaacaaaggaaatcaaagcttcaaccaaggggagatggaccatttcaagtgcttgaaagaatcaatgacaatgcttacaaagttgagctgcccggngagtataatgttagttccaccttcaatgtctctgatntatctctntttgatgcagatg

SEQ ID NO: 13450 - DNA, 420 bp, Glycine max
  unsure at all n locations
agcttgaatcggacatccgtgtganaagttatgtcgatttgaatttctcaagatcttccgctggtcaatttcgagcttctcgacatattatgcacccgaatcggatatccttgtgaaaagttatgactatttgaattctccgagagtttccgatgtttaatttcgagcgtatcgatatattataagcttgaatcggacatccgtgtgaaaatttatgaccatttgaatttctcaagagcttccgttgttcaatttcgagcttctcgatatgtgattcgcctgaatcggacatccgtgtgaaaagttataccacttgaatttctcaagagcttccgttgttcagatttgagcgtctcgatatgtgatttgcctgaatcggacattcgtgtgaaaagtattaccatttgaatttctcaagac

SEQ ID NO: 13451 - DNA, 479 bp, Glycine max
  unsure at all n locations
ctaagctactcaattgctccaggttgctgcatggaaaggcatatgtctgtatggtggtcagcagaggagcataaaccacagactcttgcgacaggtacagatttctgattcaaggccagctgggttaccaagttaaccaatgcatctagtttgccttcaagcttcttagtttcagatgatgcagatgagtttgtagctacctcatgcactcctctaatgactatagcatcatttctggcgctaaactgctgggagttggaagccatcttctcaattaaatttttggcttcaacaggagtcatgtctccaagggctccaccactggcagcatctatcatacttctctccatattactgagtccttcataaaaatattggagaagaagctgccccgaaatctgatggtgagggcaactggcacantaatttttaaatctctcccagtattcatataggctctcttcactgagttgtctaat

SEQ ID NO: 13452 - DNA, 457 bp, Glycine max
caggctccctctaattcatcgagtaactcatcaatggttggaattgggaatctgtccttgacggtaatgtcgtttaaagctctgtagtcaacgtaaaaatgccatgatccatcacgttttttgaccaataatacatgggatgagaatgggctagtgcttggaattatgccactccggagcatggtttctacctaagtttcgatttcttatttttgaaaataaggatatcgatagggtcaaacattgatgggttcagagttgggtatcaagtgtatggcgggattggtggtgtgggatggtgggagggtcattggtgtgtggaatatggtcacgaattgtgtgagttaattgcgtatttctgggtattaagcattgtcgaacgtgggtagtggattgtcggagttgatgatacgtatgtggaagaaaatactaacactgtccatatgtactattcatc

SEQ ID NO: 13453 - DNA, 474 bp, Glycine max
gtagattgaagaaggtaatgctagacataatagatgaaagacagtctgcattcataggtggaagacacttgttgcatagtgtattgatagccaatgaagcggtggaggaagcaaagaggtgccaaaagtcatgtttggtgtttaaagtagactatgaaagagcatacaactccgtctcgtgggatttcctatcatacatgatgcgaagattgggcttctgtcccaagtggattcattggatcgagggttaccttagctcagcctcggtttctatattggtaaatggtagccccacaaacgaattcattccacaaagaggccttatacaaggtgatcccctagcgcctctattgttcaatattattgcggaaggcctaaccggtttgatgagagaagcattggataagaagctgtttagcagtttcctagtgaggaaaaacaataaggcagtcaacatcttacaatacactgatg

SEQ ID NO: 13454 - DNA, 459 bp, Glycine max
agcttgtaatcgattacacacatactataatcgattaccaaaggagtttttcagaaaacattctcaacagtcacatctttttatctgtttcttaaatggccatcaaaggcttgtatatatgtgacttgagacacaaattttgataagagttttgaagatcaaaaaggtcttatcctcttaacaagcaaaattgttttatcctcttaaaaattccttggccaaaacacttgtgattcaataaggaattatttgagtgctcaaattgttcaatctatctctttcaagagagatttcttcttctcttcttctttattctgaaaagggattaagagacccagggtctcttgttgtgaaagaattctaaacacaaaggaaggattgtctctgtgtgtttagaactttgaaaaggaatttacaagatagtgaaactctcaagcgggttgcttggggactggatgt

SEQ ID NO: 13455 - DNA, 502 bp, Glycine max
  unsure at all n locations
ctattacggacctataaaactcagcttggtacaattctctcatcctatcctccaactcccatgtagaatcaccctcatcggttccccactgcaccttcaccaacgcgatctcctttcctctcaacgacttcatccttcggtcagtgatcttctgaggttgtgctctataggtgaggttatccttcacctgtacctcgtccactgcaagtatatgtgatggatctgggttgtaccgtctcagttgagagacatgaaacacaggatgcaaattcgataaactcggaggtaaggcgatatgataagctacaggcccaatcttcttcaaaatctgatatggacctagatacttgggtgtcaacttcctagccttaagagctcttccgactccggttacgggagaaaccttcaaaaacacatgttctccttcctgaaaatctagtggcttcctccttctatcataatagctcttctgcctatcctgagatgctnttatcttctctcg

SEQ ID NO: 13456 - DNA, 427 bp, Glycine max
agcttcagaattcaatttcgatcgtctcgatatattcaggtctcaatcagacatctgaggaaaaaagttattgtcgtttgaatttgctgagagcttcaacattcaattttgagcgtctcgatgtattacgggacttaatcagacatccgagttaaaagttattgttgtttgaatttgctgagagcttcaacattcaatttcgagcgtctcgatattttacgggactcaatcagacatccgagttaaaagttattgttgtttgaatttgctgagagcttcaacattcaatttcgagcgtctcgatattttacgggactcaatcagacatccgagtaaaaagttattgtcgtttgaatttgctgagagcttcaacattcaatttcgagcgtcttgatgtattaccggactcaatcagacatccgagcaa

SEQ ID NO: 13457 - DNA, 425 bp, Glycine max
agcttatgaacctcatatgaacttagtggattttgtaacaaattgtaggcaataacaatgcattgactaatagtttcatcctcgaaatcttatcaatcctccaaaacaagcatgagaacatattccagtacatccatgccttttcattctatttagaataattaatgaaaaagtcgatgctacctaagacaagcaaaatcacaataaaggccttcatctctaaagattagctcatttaagaatgtcaaaactggcatcaatcctttctttgtaagccaaaatatggcacaaaagctaaaagagcaaataacaacaaaacataaaatctaataaggctaatgatcacaattcacaaaaaaatagagtagatagatattatcttataaagaaactaaagagttgctcacacgatgaaatgtgtatat

SEQ ID NO: 13458 - DNA, 414 bp, Glycine max
  unsure at all n locations
agcttatcaatgtggcagttccggtgaccattgacgaactggcgatcaatacaaaanatatactcaatccatgggaaaggaatgaaaatcacacactttgcctcaactctgctaaagcaattggatgtacagtagtcaacattggcacccaggacttcattgaaggaagggtatgcttgtaggcattcaagtttccacccataaaagcagaattattgtgggcgtgtacactgcagaacaacaaaatttaagattaaatttaatttataaatgaaatcctttgttaagttatgaaataggaatttttttattttaaaatcaaatcctttgttcagaaagttataagaaatctttttttttttttttttaattttagttgtgtatactacaaagaaatctggtcaaatctgatta

SEQ ID NO: 13459 - DNA, 403 bp, Glycine max
  unsure at all n locations
atcttgttcatcaatggagtnccttgcttcttgaagattaatggtagcggaatggagatggaagaatactgattggaaatgccacttcaaggagaagatgagtcaagaagaagctcaccaccatatgaagccatggataagagcttgaaggtaggagaaaataacacgagggagagggagagaaggaacacaacattntgtgcctcaaaacaggtctgaactttgaagtgtaattctcaaatgatcaaagttgaaaaatgcacacacatgacctctatttatagcctaagtgtcacacanaattggagggaaaattgaatttctattcaaaattcacttgaatttgaaattgaatttgtggagccaaaatttcattaattatgattaagtgaatttcagtatg

SEQ ID NO: 13460 - DNA, 334 bp, Glycine max
gagaataatgtctaatctctgaagtctaatttctcaaatgatcgaagatgaaaaatgcacacgcaacggctttatatatagccttacagcacaccaattggaggaatttgaatttattgaatttccttggatttaatttgaggagcccaaatttcaccaattataattaatgaatttccgatatggtactacccactaatgcaagatcaagtacaagattctgcactaagtgtgcttaagtgtcatgaagcatgtatagcatgaacgacatgcacaaagtgtgactatatgatgtggcaatgacgtgtagcaagcaaatgttcaccttcccctt

SEQ ID NO: 13461 - DNA, 392 bp, Glycine max
  unsure at all n locations
atatggagctgactggcaggtcaaaagcctcgagcacggaatatattaataagttctcggcatctctcctctcattctgacccctttggatctgtgtttgaagatgactttagtttttgttaatgttatttatctgattgtttattgaaacaatatacaactttagagcatagacctataaggtaccatccatgggtgtattggacatacgtgtagcttctagatgctattgtaacattctngttgaagatatgtaatatggaccagtaatggatcaatttcgtanaagagcttactcgttattatattaacgtttaccactctagttaagtcgcgtccatacttaatatggataatgattttattatgatatacttaccgtctaacggact

SEQ ID NO: 13462 - DNA, 259 bp, Glycine max
  unsure at all n locations
atgactgttngactatgccttgtngcttcatgtnntaatttgaacatctcgatatattatgcgcctgaatcgggcatcntgagtgaaaattatgccatatgagttagtcgacagcttcgntggtcaaattcaagcgtgtcgacatattattggcctgaatcggacatctgagtcanaagttatggcagtttaaatttccatgtgcttccatgtttaattntgagcatctcgatatattatgcacctgaatcggacatct

SEQ ID NO: 13463 - DNA, 281 bp, Glycine max
  unsure at all n locations
ctttcactcggaagtgcgaatgagtcctgttatatatcgacacgctcgannattaaaccgaagctcatagcacattcgaacgacaataacttctcattcggaagtctcgatgagtcccataacatatcgagatgctcaaaatagaaaacagaagctcgttgcatattcgaacgacaataacgttntactcggatgtccgattgagccccgtaatatatagagacgctcgaaatttaacaccgaagctcgcagcanattctaacgacaataacttttcactc

SEQ ID NO: 13464 - DNA, 182 bp, Glycine max
  unsure at all n locations
ctaccaactacaaaccctaagaaaactatattatctacacaaaaagtacacttctctatatttgcatagagggtggttttcctaaggactganagaacttgcctgagatgtcctaagtgatcatctaggctcctactgtacactanaatatcatcaaaataaacaactacaaatctacctat

SEQ ID NO: 13465 - DNA, 205 bp, Glycine max
  unsure at all n locations
gacaataactatttactctgatgtctgattgagtcccgtaatatatcgagacgctcgaaantgaatgttgaatctctgaacatattcagacgaccataactttctactcggatgtctgattgagtcccgttatatatcgagacgctcgaaattgaacgcggaatctctgaactaattaaacggctatactcttcactcggatgct

SEQ ID NO: 13466 - DNA, 402 bp, Glycine max
  unsure at all n locations
ttcttctagacttagagagataacatgtaatcctcttgaacccttaccttccactctctcatcatgccgagactccggaaccctaacaggttttgccttttccatgtacttgaaacanaactcaatagcttctttctcaatgtacctttcaacaatagatgctntacgacggtgtagattatntgtataccattntaagatcgtcatgcatcactcaaccgggtacatccaccgcanataaacgggaccgcaacatttaatntctctcaccatatgaacaatttagtgaaccatgatgtcaaaacatgagagaggaatatatatctccaactgacatatgataataatagcctcattttctagctcatctaacttgagaggatcaatgactnntgcacatat

SEQ ID NO: 13467 - DNA, 253 bp, Glycine max
  unsure at all n locations
cctactatatactatcttctctccatgtntcagtaggatgaagttggtggttctatcacatatagggcatgcatgatgtcntttgacactatatccacttaaatttccatatgtnggagagtcattaatagtacaaaacactattgaacgtaacctgaaggtctgttgcatattggcatcccatacatcaaccccgtcttctcacnaatttctcatgtcttcaatcaatggattgagatacacattgatatca

SEQ ID NO: 13468 - DNA, 303 bp, Glycine max
  unsure at all n locations
tcttctctgatcatnngctggtcacaagtcaatcctgttctttnntgtatttcatttctgggattctctgagcattcaagaagaaaatgtgacttctntacctcatgtacttgatcttctagcagtgtaatgcattcctcctgtanatcattctgtggcataatcctactcanaactntgctgaaacgagtgcttttatngttttgtaaggatcgtcctctagcatttgtcatggatctgtcagtaaccaccattggctcattctcatctgctatagtaacagcagctggtgtcttctctttt

SEQ ID NO: 13469 - DNA, 358 bp, Glycine max
  unsure at all n locations
tctgaagcttgtaatttttttcattgtatcttttagactatttattatggaagcttatcttgttacatatttcaagcaacaatattatttaataataagatcagatttttattggtcattatatacgaagtagattataatttagtggttatctaaatattttattataatttaaaaagtctaatcacagaatcaccactctgggattatcatctacaatggatacatgtgctactatatactttaattatatacaccatacatgttgaatcacccagtaccaaatcatatgntacacaaacactaccacccattctcggtgctaattaggtctgaatataaagctttttttgaaatt

SEQ ID NO: 13470 - DNA, 170 bp, Glycine max
  unsure at all n locations
aaccttagatggtcgaatccttcacaacatcaacaacaaccttatnttcaaaatgtggctggcccaagcagaccatacgttcctccaccaatccaacaacaacaacaacaacagcctcagatagaacaaacagttgaggcctctccacaaccttcccttgaagaacatgt

SEQ ID NO: 13471 - DNA, 267 bp, Glycine max
  unsure at all n locations
ctcgagagcttccgttgtcaatttctagcgtctcgatatattatgcgcccgaatcggatctccttgtgananagtatgactatataaatctcacgagaacttccgttgttcaatttctagcgtctcgatatattatacgccagaatctgacatccgagttataaagtatgaccatttgaatttctcaagtgcttccgttggtcaatctcgagcgtctctatatattatgcgcccgaatcagatctccttgtgaaaagtatgactatt

SEQ ID NO: 13472 - DNA, 232 bp, Glycine max
  unsure at all n locations
gcgacacacaactcccaccgcatatagaatatcgggccttgtattggttagataccttaaactccncacaagactctngaagatcgnggagtctaccttctctccttcatcannaattgataacttctaagccaccttcataggtgtgttcacgggaatgcaatcaagcatattaaatntcttcaacacttcttttgtgtagctttcttgtgagacaaagataccattcttc

SEQ ID NO: 13473 - DNA, 210 bp, Glycine max
ctcactgacaatctccttggatagaagcttctcttgattgaaatgacaatcaatctctatgtgcttactcctttcatgaaaaactgcgttcgaggcaatatgaagagcatcctgattatcacaatacaacttcaatggtaactcttcataatacctcaattctcgcagaagctgtctaatccacattagctcacaagtaaccatagccat

SEQ ID NO: 13474 - DNA, 267 bp, Glycine max
  unsure at all n locations
aatgcctctaacagcaccttagtcaatgatnttcttcatgcctcttaagagcagatgtccaaatctttgatgccatatattgacttcatcttctttggaggatagacatgtggaggagtaactggtttcttgaggtgtccatangtaacacgtgtcctttgatctgctgcccttcattagaacttcactcttctcatattgcaccaagcattctgacatttgtgaagttacatttgatccttcatcacacaactgactgatgcttga

SEQ ID NO: 13475 - DNA, 294 bp, Glycine max
  unsure at all n locations
acggagtttccgactatgctcttgtgtggtggaacaagctacataaggagagagcaagaaatgaagagccaatgtgtgatacatggacgcagatgaaaaanatcatgangaagatgtatgtgccggctagttactcaagggacttgaaattcaagctccaaatactaactcaaggaagcaagggggtngaggagtatttcaaggaaatggatgtgctcatgattcaagcaaagatngaagaagatgaagaggtaactatggctcgntttcttaacggtntgactaatgatatct

SEQ ID NO: 13476 - DNA, 453 bp, Glycine max
agctatttatcataggaggcgtagttgagggtggcactatgaaatttttcactaaaataagcaatagggtgcccaccttgtaacaatacagctccaacttccactccagaggcatcacattctagctcaaaagttttagaaaagtcaggaagagctaaaacaggtgtcttagtaagcttttctttgagcaaagcaaaggctcgctcttgtttttcaccctatgtaaatgccacattcttcttcaccagctcattgagaggtgatgcaattgtagagaaattatgaacgaaccttctatggaagcttgctaacccatggaagctcctaatatcttctaataaccgaccactaacctataatacataattaccattcttagaaccgcagtttcatgggtgtttgcattactttaattccatttatgtacaattccaacaaactatttagtctata

SEQ ID NO: 13477 - DNA, 436 bp, Glycine max
agcttcaacattcaatttcgagcgttccgatatattacaggaatcaatcagacatctgaataaaaagttgttgtcgtttgaatttgctcagagcttcggtattccatttcgagcgtctcggtatattacaggactcaatcagacatccgagtaaaaagtgattgtcgtttgaatttgctcagagcttcaacattaaatttcgagcgttcggatatattacgggactcaatcagacatccgagtaaaaagttattgtcatttgaatttgctcagagcttcgatattccatttctagcgtctcgatatattacgagactcaatcagacatccgagtaaaaagttattgtcgtttgaatttgctcagagcttcggtattccatttcgagcgtctcgatatattacgggactcaatcagacatccgagtgaaaacgtatt

SEQ ID NO: 13478 - DNA, 420 bp, Glycine max
  unsure at all n locations
agcttcccaagtctntaagttcttcctcanaactgtcctaagcaaagttcccaatgtcctattaacaacttctgtttgcctatcagtttgtgggtgacaagtggttgaaaataacaatttagtgcccaacttgccccacaaagtcctgcaaaaatggcttaagaacttagagtccctatcactaacaatgctccttggcaaaccatggagtctcacaatctccttgaaaaacaaatcagccacatgggaagcatcatcaacttttttacatggaataaaatgagccattttagaaaacctatcaacaaccacaaaaatggagtctctaccaccacttgtttttggcagccccaaaacaaaatccatggataaatcaatccaaggatactccggaattggcaatggagtatacaatccatg

SEQ ID NO: 13479 - DNA, 381 bp, Glycine max
agcttgagaagagcctcctcataccctttatagaagtcaaagtaatcatctttcaaatcaacccttttatgggtctcaatccgttttcttgttttctctcaattttttcatttgcatggctttctctctcaccgtcgtgggaaaaagtgatgatctttttgttctattttttgcggggtgtgttgaaaagggtttatcgtttgtttgttgcgtctgattcgcaggttgaatgcacgattccaaaggatgatggaactctggtttcctatgtgggattcaagatccaacatgataatgctcgtggtcctatgaagggagggattacgtatcctcccgaaggtctcggggtttgaacctttatattgattttgtttctcatca

SEQ ID NO: 13480 - DNA, 407 bp, Glycine max
agcttaatataagctatcatgtgatgtgtcttaactttattccacttcactgtactcgcaggcgataaacatccatcatgagaagagaattgactcgccggttgacaaggacctgaagaacgactatgatgggattgaactcgatgaaatagctcaagtggctcttctatgtactccataccttccaagctacagaccatagatgtctgaagtggatgggatgctagaatgagatggtcttgcagagaaatgggaggcctcacagagagctgaatccacaagaggtagacgctatgaactctcatcttcagagcgctactctgatctcactgatgactcttcattactagcccaagcaatggaactatctggaccaagatgatctacatagtcactgcgacactgaa

SEQ ID NO: 13481 - DNA, 357 bp, Glycine max
  unsure at all n locations
ttcacgagagctttcgntgttcattntcgaacgtctctatatgtgatgcgccttaatctaacatccgtgtgaaaagttatgaccatttgaatttctcaagagcttacgttggtcaattatgagcctctcgacatattatgcgcccgaatcggacatccgtgttaaaaggtacgagcatttggatttctcgaaagctatcttgggtcaattccgagcatctcgacatattatttgcccgaatctgaccttcgtgtgaaaagttatgaccatttgaatatctcgagagcttcctatgtttaatttcgagcgactcgatatattatatgcatgaatctgaccttcgggtaaaagttatga

SEQ ID NO: 13482 - DNA, 402 bp, Glycine max
gcaagcttctatagaaggttcgttcctaatttctctacaattgcatcacctctcaatgagctagtgaagaagaatgtggcatttaactggggtgaaaaacaagagcaagcctttgctttgcttagagaaaagcttactaaggcacctgttctagctcttcctaacttttctaaaacttttgagctaaaatgtgatgcctctggagtgggagttggagctgttttgttgcaaggtgggcaccctattgcttattttagtgaaaaacttcatggtgcgacccttaactaccccacctatgataaagagctttatgccttaataagagcactccgaacttgggaacattaccttgtttccaaggaatttgtcattcatagtgatcaacaatcacttaagttcatt

SEQ ID NO: 13483 - DNA, 363 bp, Glycine max
  unsure at all n locations
atgttcttaatactggactaatccatttgcttccagagtttcatggccttgcaggtgaagacccacacaaacatctgaaagaattccatattgtttgctccaccatgaaacccccagatgtccaggaggatcacatatttttgaaggcctttcctcattctttagagggagtggcaaaggactggctatattaccttactccatggtccatcacgagctgggatgacctcaagagagtattcttagaaaaaaatttccctgcttccaggaccacgaccatcagaaaggatatttcaggtattagacaattcaatggagagagcctatatgaatactgggagagattaanaagttatgtgtcat

SEQ ID NO: 13484 - DNA, 369 bp, Glycine max
  unsure at all n locations
gtctctatggcaggaatgatcactntaattaattctgttctgacagccttgcctctgttttacctgtctttcttcaaagctccttcagcagtgttaaagaggcttatttcgatccaaaggaattttctatggcgtggaggtgctgaagggaaaaagattgcttgggcggcttgggatcatatctgagttcctagaatacaatgagggctacgaatcaaagctctcaaggactctaatagagcccttctcattaaatggaagaggctgctgttccaccaatcagactacttgtggagcagaattcttacctcaaaatacaaaggttggagatggttggaggagaattcccacaagcagactcattcctat

SEQ ID NO: 13485 - DNA, 486 bp, Glycine max
ctcgtccggatccttaagtcacctgcggcatgcaagcttatggctgtcttctctgcttcaagaacttggaatcattactagaatggctattgaattattagtagacagtaaatctgctattgatctagcaaggaatccagtctctcatgactgaagcaagcacattgagactaaatttcattttctgagagatcaagtggctaaaggaaaggttaagctagtacattgcagaactgaggttcagctagctaacataatgactaaggcgttgaaggctgacagattcaaggagctgagaaggaaaataggcgttcagagtttggaggattaagaagttttgttcagtaaatgttgttgtaatgttcttgttgttgattcactgtttttgaatcaaaggggagtgttagggataattaattccaaaatagttactagtttgttagtagttgatggtggttagttagttgttttagtctatatatagat

SEQ ID NO: 13486 - DNA, 440 bp, Glycine max
  unsure at all n locations
agcttttagaanacgtcgatgtcaagtgtatactatttttcttttatgtttcagttgtacatagcttgtgtcttcttcatagatatggcatgcacgatggttcttaacactgtatccactcaaattccgtatgctggaaagtcatttatggtacaaaatagcattgcgcgtaacttgaatgtctcattttgatacctaccaaacacgacaaccctctcatcccataacttgcttaagtcttcaatcaagggattgagataaacatcgatgccatttcctaggtgtcttgggcccgatatcatcatagacaccatcatgtattttcgcttcatgcacaaccaaggaggcaagttgtaaattactaacaaaataggccacgaactgtgttgagtgcttaaactgtcacatntcattagtagcaagttcaagcctaagatttc

SEQ ID NO: 13487 - DNA, 448 bp, Glycine max
  unsure at all n locations
agcttttctttgtgggttgatgaactctgtcacgcagaatggcatgatcgctggctgacatattctcaattagctcagttgcctcttcaggagtcttcagctttatttttccccttgttgaagcatctagcagttgcttggtttatagtctcagcccatctataaacatattcaattgaattggctcagagaacccatggatgggattctttctcaataaaactctaaacctctccaacgcttcactcaaggactcgttagggaactgatgaaatgaagagattgcagccttcccttccgcattctttgactatgggaaatatttcttcagaaacttttctacaacttcttcccaggttttcagactgttacccttaaataagtagagccacctcttggcttctnctgccaaggaaaatgaaaactggctgagtctaatagcctcatc

SEQ ID NO: 13488 - DNA, 358 bp, Glycine max
  unsure at all n locations
accaattggtcactaaagttgacaaagtcaatggtgatttctccttatcgtaatttctctctcacaaaatgacaatttatctctgtgtctaatatgttcatggaagactagattggatgcaatgtgaagagtggtttgattatcacaaataagcttatggccatatgtttcttcaaattggagctgccggagaagttgtcatagccacgtaatttcacttacaactgctgccaaggcacaatattttgcttccgcactagatctaacaattgtattttgtttcttgcttctncagtaaagataagtacctccaataagaacacaaaaaccagaggtagatctcctgcttgatggtgat

SEQ ID NO: 13489 - DNA, 418 bp, Glycine max
  unsure at all n locations
agcttcatcaacaacatcgatttcataataaaatagcattggttcttaccaaaaaccgatgtctgttatcagaaaacaacatctatttttagtgaaaatcgatgttgttttattaccagcaacatcgattttttactaaaaaccaatgttgtcttcatatattaacatcggttttggtaaaaaccaatgttgatatgaagatatatgacttttttttataattcttactatataatattgattatttaaataatcgatgttgtaattttatgttaacatcggttttagaaaaccgatgttaaccgtattactttcaacgtcgatactttcaaaattggttgaataaccaattggaaagtccttaataaccgatgtaaaaacctattntctagtaatgtctcacccctggtctttcatg

SEQ ID NO: 13490 - DNA, 477 bp, Glycine max
  unsure at all n locations
tctcagcttatattgtaggcttcttcttgtgtaacttgtcaaaggtggcctcttatgaacaaagaggataggcttaaactccaactgtacctcacctcagaagtgcttgacagccaaatgctcttcctagtcattggtgagactcttgtagaaagcagaatactcctcctttgtgatctcctcaggctttgtcatctaaatggccttgtgcttgttcaccaatgagcattcatgtgacacttccttaatcttctttttattntgttctcccttgtccttctcttcatcaacatcctgcacctaagtacatgaaaaaattacttattgaagtaaaattgtaattaaaaaaataccaaaaaataaaaaaattacattctanagtacttttntagatgttattcgttatggttcaagtaataatcatgatgaaaatngatccatgtgtgtttgatttcttttatcagcaaatatgatatg

SEQ ID NO: 13491 - DNA, 328 bp, Glycine max
  unsure at all n locations
tgacaataactatgtactcggatgtccttcaaagttccgcaatatatgtagacgctccaaattgaaaatngaagctcctagcaaattcaaatggcaataaatttttactcggatgtccgcttgagtccggtactatatcgaaatactcgaaattgaaaacggaagctcgtagcagatgcagaccgcaataacatttaactcggatgttcgattgaatcccctaatatatcgagatgctcgaaattgataatagaagctctgagcaatttcgaactacaataactctatactcggatgtccgatagaggtccgtaatatattgagatgc

SEQ ID NO: 13492 - DNA, 435 bp, Glycine max
  unsure at all n locations
agcttgtaggaaattcaaacgataataactttttattcggatgtccgattgaatcgggtaatatatcgagacgctcaaaattgagactagaagctctgagcaaattgaaatgacaataactttatacacggatgtccggttgagtcccgtaatatatcgagacgctccaaattgaaaacggaaactcttagaaaattcaaacaacaataactntttactcggatgcccgacagagtgtcgtaatttatcgagagatgctccaaattgaacacaaaagctcgtatcaaattcaaacgacaataactttttactcggatatctgattgagtcccgtaatatatcgagacgctcaaaagttagatccgaagctctgagaaaattgaattgacaataactttatacacggatgtccagttgagtcctgtatatatggag

SEQ ID NO: 13493 - DNA, 388 bp, Glycine max
  unsure at all n locations
actaccctnggttcgctaacatggaanactttaaggccacagaacaaccaccagaaggtataaaattccacaagagataaaggttcttcggagaagccaccaagtatgttcgggattaccctattcttttttgtattggtcctaacaatttgttaagacgatgtgtaacaaagggagaacaaactagcatattttcacattgccacaactcaccatatggaggcaacttcaacggagaaagaacaactgcaaagatctttcaagccagattctattagcctaaattcttcaaagatgctcataaccatgcacgatcatgcgacaactgttaacgaactgacaacatatctagacgacatgaaatgccattacagaacatgcacgagat

SEQ ID NO: 13494 - DNA, 391 bp, Glycine max
tgcaagcttgatgccaacattggagaggttaatgaatcaacgagatgatgcgctccatgagaggttggatcaaatggagaacagagatcataatgattaagaaaggcggagaagagggaatgatggtgttcctagacaaaaccgaattgatggtattaaactcaacattcctccctttaaaggaaagaatgatccggaggcctacttggagtgggagatgaaaatagagcatgttttctcatgcaacaactatgaggaggaccaaaaggtgaagcttgccgccacagagttttccgactatgctcttgtgtggtggaacaagctacaaaaatagagagcaagaaatgaagagccaatggttgatacatgggcgaagatgaaaaggatcatg

SEQ ID NO: 13495 - DNA, 400 bp, Glycine max
  unsure at all n locations
tcatccgcaaactgaagcatgtatactgggaccttattctttcctaccaaaaagctgtgaaagaagtttgtagagactgcttccctcatcaaacctgataacccttcagcagccaaaacaaataaaaaaggggccaaaggatccccttgcctcannacctcttgaggcttaaactcctcagttggactaccatttacaaggatggatattgaagctgaagaaaggcagcctttaacccaaccaatccacctttcatggaaccccattctcctcaacatatagaaaataaatngccaggacacagagtcataagctntctcanagtccactntaagcactaaacacgaattcttttgcctctagcctcctcacaacctcacttcaatcagaactcatgtac

SEQ ID NO: 13496 - DNA, 451 bp, Glycine max
  unsure at all n locations
agcttaccaccataggaggccatggataagagcttggaggaagaaggagatgaatgaagggagaggaagagaagagcacaaaattttgtgttctaaaagagctctatctgaagtttcatttttaaatgatgaaaattgaaaaaatgcacacacatggcctctatttatagcctaagtgtcacacaaaattagagggaaatttgaatntctattcaaatttcacttgaatttgaaattgaatttgtggagccaaaatttcactaattatgattagtgaattttagctatggttaagcccactaatccaagatcaagtccaagattctccactaagtgtgcttaggtgtcatgaggcatgtaaagatgaaggacatgcacaaagtataactatatgatgtggcaatggggtgtagcaaacaaatgctcacctcccnctctaaaatttaattgg

SEQ ID NO: 13497 - DNA, 321 bp, Glycine max
  unsure at all n locations
tttctcatgtgcacccaaacccaatcttcgggttcaaagacaaccttctttctccctttgttggcttgtctagcatagcttttattnttcctctcaatttgatctttgactctctcatgaagcttcttcacatagtccgcctttgcttgaccttctttatgcttaaaaacataaacattatgcataggcaaaagatcaagaggagttagtgggttaaaaccataaacaacttcaaaaggagaacaattagtggtgctatgaacaactctattgtaagcaaattcaacatggggtaaacaagcttcccaagtttttaagttc

SEQ ID NO: 13498 - DNA, 336 bp, Glycine max
  unsure at all n locations
tatgtagatcaaccccctggatttgaaaactcagacnagactaatcatgattttagattaaaaaaggctntatatggctcaaagcaatatagatactactcttttcataaagagaaaattacatgatattttattggttcaaatttatgttgatgatattatttttggatctactaatgaattattgtgcatggaattctctcatgacatgcaaagtgagtttgaaatgttaatgatgggagaacttaatttctttcttggattacaaattaaacaaaccaagactnggaattttgtcaatcaatccaagtactgcaaagagttaattcacatatt

SEQ ID NO: 13499 - DNA, 363 bp, Glycine max
agcttatcaccacactccttcaaaccactggcctcaccaccaacaacttcagcttcgtgaatctcacttgcgactcccaatttggcgtcatctcgatcctcttccccgcaccgtactctccctctaatgccaccatcctcttcttcataaagaagcgtgatggcactagaaaaccactgagcgccactacgctgaactttctcctcatcggtagggacacatcgttggtggcgctaagctggttcttctgactcttcatgaaccaccccatcgtggaagaaaagatcctcgcagagctaacgttggtgcttacttccactcatggcggcgaccgacgacactggatggaggaggcaatggact

SEQ ID NO: 13500 - DNA, 437 bp, Glycine max
  unsure at all n locations
cttcattgcatccagccactntctattntcttcactntccatggcctctctaaagcactcaggttctccatcatctgttaggatcacatactcattaggagaatacctcttagaaggttgtctctccctattggaccccctgagttgaagttgagatggtttggtagcatcaccaagattttcatcttgtgacatgtcatgctcctcctcctcatcatcagaagaaacatctacctcgtctctaggttgttggacaccaacatcattctgagcatccatattcaaattctgaataggcggctgaactggttgaaaatcagccacatcgttgtcttccttgggtgtagacttctccaccttaccattgtcttcaatggtttggttttccatgaatttcacatcacgaattataacaagcttcttctcaacaggatcat

SEQ ID NO: 13501 - DNA, 397 bp, Glycine max
caccaccattaccaaagccagacgctcaataccatcaaaatcagcatgttcaatagccaatattcccgcatcagcaaagagctcctctggaaaattgtaaatcaactgtctgttaacaaaacagttgataccatgacctattatcttctgcaccttttctctcattttctctttctctgctgtttcaatttgagcaactctagccatagaatcaacacgaacacgtgcaccatatatcttcactttgtctgtgtccatggcagtgtttgccaccagtatctttgcattctctatccgcttgtgttgtccaataccaattttcttgtcaagaatgaatctgatcaaataattaaaacagaaagaaagcttactttctacccagagtaataaaatgata

SEQ ID NO: 13502 - DNA, 328 bp, Glycine max
  unsure at all n locations
ttggtttcttggggcctgatttggacttaaaataaaacttgtgtttcttttgtcttggcatcatcaagaccatcatacacatacattcacaaacatcgctatattgtcgtaacaacccattgtcttttgaaccatggatccctnccactcaagttttggtgttatgcattgtaaatcgcaacgtgtctcatcaatcggatgccctctctcacactaaacgaaaagtctccattagaagtcttgtttcatcgtccatcaaattatagtaaactaaaagcttttggttatctttggtttccttgggtcactccatatacaactaacaaac

SEQ ID NO: 13503 - DNA, 444 bp, Glycine max
  unsure at all n locations
gctgttagtgtgtgtntaaatgtctattatattataaaaattatgtaataatgtttctttgaagaaaattttatcagtgaaaataaaatattttgaatatgaattttgtagtatttttttaattagattaggttggtgttaatgatttattagtgtgttaataattcatgaacgtttcaactttcatttaaaaaaattagtagatcatatttatttgaagaaagtattttgagtatgaaatttattttaatatgaagttgtagtatttttttaattagattaggttcatttttttgtgttaaaaattgataagcgttcaagttgaaagtgttatttgatgatgttttgttgtttcttgtatcatatttaatttaatatatnntgtagtaatttgtaattacctattttcattttgaagttattattggtaagaattaatatttt

SEQ ID NO: 13504 - DNA, 432 bp, Glycine max
  unsure at all n locations
gtcactaaagntattaaatttttttcaattcaatttaatattttttaaataaaattaagataattcaaatcaagtttattataaatactaaacttccattaaaagacacaacaaacggcgacggataaatacagggtattttactaatctatataaattagaaactggccagtggattttttacaggacttctaattatggttgatgaaaagataatttattttaaatttaattaaaatgtattgatagtataattttttttacaatgaaatctaattatgaattatcatatgataaaattattaattttatatctctggttgcttagtgtggaggtaaaataaataatctgtcaatggttgtcattgagataactaaagtacgaatttattaacgggcaattaagtatctatataaatactccggtatctc

SEQ ID NO: 13505 - DNA, 448 bp, Glycine max
  unsure at all n locations
agctaggtatagctagtattctttgtcctatgtatacgtatcaaactattcctggctctaacacaaattagaagatttattngtttgatcgcataatgactaacattcatcacttaattgtgcattagagcatatttatgcagtagaatgcttctattgatggtaattgaagaatttcagagtttgactntatttattcttcataggattcgatagattctagaaaaatgtctatgcaaaatagatctcagacacaaaatattaaataaaatcttaaatgtcatttttaatggtatattagaatatgatttgattttgctatcgtctaaaacattatacacagatttcaccaatatatgttatgatacacataagaccgaacttttaacatttatatttgtttatatctaatcacaataattagagatctttaattatcttaagatac

SEQ ID NO: 13506 - DNA, 308 bp, Glycine max
agcttcttaacgcttattcagggtacaactaattatgatgcaccctccatacgaggaataaactaccttcatcactgaagacgccaacttctgttatagggtcatgcctttcggactcaaaatgatggagctacatactagaggctcatggaccaggtctttaaacatcagataggccagaacgttaaggtatatgtggacgacatggttatcaagtcttatagtgtggcccaacatgtagcagacttgaaggaagtatttggagaaacctcgaaatatgacatatgcctcaaccctgaacatgcacc

SEQ ID NO: 13507 - DNA, 425 bp, Glycine max
  unsure at all n locations
agcttacttcatctagctnttctctcctattatgaattttcttctgtttttcagcagtcttttttattgaaaattctgttgcttacctgaattttgttatataggggtctatgcaggcgatccttcaaaattaagtatgaaagcagcattcgggaaagtttggaagctggaaaaaaatggtggtagcattattggtggaactttcaaagcaatacaagagagaaatggagcttcaaaaccacctcgagatccgtaataatatatttgctctggatttttgccataatttattgagtatttcactaattcaattaatcatgtaggcgtctgccaaaaccaaaaggtcagactgttggatctttccggaagggacttaccatgttgcctgatgcaatttctggcaggtactacatgtngtctaatac

SEQ ID NO: 13508 - DNA, 403 bp, Glycine max
  unsure at all n locations
tctacaaagcatacggctntctggatgtagatgatgttatctatacagatggatcttatatatctatatatctatagatagatatatagatatagatatatagatatagatcatacaatgaagtaccgcacgagtgggtatataggaatccaaatctgccgaatcactcatgttatgatcttctacatcctaggtcttcccgttccttcatctggcttatgttcttcatgtagcattcagactgaatgactctatgaaattacgtcgctacttccacatggtacgggtaacgtatgagacatctctatttttcccggggggaatccttagaattaccacagcttagctttcaattcgcctctgaccatcaaatgaaatgtgaataacccgtcctcccctcttt

SEQ ID NO: 13509 - DNA, 451 bp, Glycine max
  unsure at all n locations
agcttctgataaaaaccgagcagttctaataagatttgtaatatgaatacccttacgctttgcagatatataaggtgacattttaggattccattttctagtaccgtggccaaaatgaactcctgcttccatcatctcttccaagattatgttccaatatctttttgtcatttatatttatccccacacttttctttcatttcaaaatcgaaattctataaattttttgaaatgaaagaaagagacccggtatactgaaatagaaataagtgttccaaaggaaccttctcttctaccgaagaatggcctttgataaatgatcgggccattttttctatttaatatttaatatgattattctctctattatctttcttttattatacaaaataaaatgaccgaagatgaatccgctcttaagaatcattattttanggaatattaaatacta

SEQ ID NO: 13510 - DNA, 346 bp, Glycine max
  unsure at all n locations
ctttattgaacgcataanatataatattgattatgtatgggattaatcttctttgtcatctgagaagatcaaacgtcgatagttgatcagaaatatatcataaaagataaaagaactaagtgtatatgtaaatataatatatagaagttcacacatatataaactgaagcaaaaatatgttaatgcatcatataaaatataggcaagtgtacatacgaatagatcttttgtcttgtgtagataggcacaatagtattaatgaatcgataattgcaaaatcaggttatgaaagatctgacaaaaaacagagttttaaatatatatgcgaacataagatatagaaact

SEQ ID NO: 13511 - DNA, 258 bp, Glycine max
gcttgctaacatttgtgttattacgaactttccttatctttatatggaaactcgtcatgaacatcttgagaagttggtatctgatccactggaccagacccatcaatctgatgaagcaactatttctcaacttcagggtgtgcagcacccacatagacaacagaacacaaagtaaaggacgaggttgctgagacatcaccgaagcgctcgcaagtaacaccacttatggactcatgtgcgaacacattctctgacaca

SEQ ID NO: 13512 - DNA, 505 bp, Glycine max
  unsure at all n locations
ctttaatgcggtttcagttcanatgaactacaaagattagccattatttaggcatgtaacatgatataatattcctaggtggttttccttttgactagtgtgactaggggcatcaagaagattgttttaactatattatgggcttaagaggtttatttatctaacttatcttcaccttcaacacaacacaaacatattagcaacatcaattnttattcctgagtgctgttaattntaaggtgtatactgatgcgagacctgagaccagaaaggcataatgtagatgggagtttgatgtcatacccttacaatgaaattgctgataaataaataagttggcagatgtttgtcaaaacagccacaaaaggtggcacatgccaccttgctactgacaaatattcaaatatatatgtaacatggtgaggaagatgctggatggtgaatctctctccattgtagtggaggtgtcgcatcactattcaaccattcattcattcattcacca

SEQ ID NO: 13513 - DNA, 470 bp, Glycine max
  unsure at all n locations
tcatgctgaagcatgtatggcanaacttcattagtgttgttcaacacatacaagtgagcttgtaacanatcttctacacttggagtgataacatgcagtcctcttgaacccttaccacccactctatcgtcatggaaagactcaggaaggccagcaggttttgccttttcaatgtagtataaacaaaattcaatggcttcttttgcaatgtacctttcaacaatagatgcttccggacgatgtagattcttcgtatacccttttaagatcttcatgtatcgctcaaccgggtacatccagcgcagataaacaagaccacaacatttgatttctctaactaggtgaacaattaagtgaaccatgatgtcaaagaaagcaggaggaaaatacatccncaactgacacagtataattgcagtctcattntccaggtcatcaaacttgacaggatcaaggactntgctacatat

SEQ ID NO: 13514 - DNA, 432 bp, Glycine max
  unsure at all n locations
agcttcttagtttcagatgatgcagatgggtttgtatctacctcatgcactcctctaatgactatggcatcatttttggcgctaaactgctgggagttggaggccatcttctcaattaaatttatggcttcagcaggagtcatgtctccaagggctccaccactggcagcatctatcatacttctctccatattactgagtccttcataaaaatattggagaagaagctgttctgaaatctgatggtggnggcaactgacacatagtttcttaaatctctcccagtactcatacaggctctctccactgagttgtctaatacctgagatatccttcctgatggctgtggtcctggaagcagggaaaattttttctaagaatactctcttaaggtcatcccagctcgtgatggaccttggagcaagggaatac

SEQ ID NO: 13515 - DNA, 372 bp, Glycine max
agcttcaacctagaggagacgaaccattccaagtgttggagaagatcaacgacaatgcctacaagattgacttgcctagtgagtataatgtaagtgccactttcaatgtgtctgatctatctctttttgatgcagatggaggagccttggatttgaggacaaatccttttcaaggagggagtgatgaagacataaccaagggcaaggaccatgaagcacttgaaggtcccatgaccagaggcagacttaaacaagcccaacacatcatagagacaaggctggtcatttgtatagctgtcattgatgatgattgaaggcccaagtggagaaagatgaaggcccagaggcagaggcactaccaagactactaat

SEQ ID NO: 13516 - DNA, 390 bp, Glycine max
  unsure at all n locations
agctntgagcanattcaaacgacaatatctnctgtttcggatgtgcgagtgggtcccgtaatatatctagacgctcgagattgagaactgaagctctgagaaaaatcatacgacaataaatctttactcggatgtgcgattgagttccgtaatatatcgagacgctcgcaatggaaaacagaatctctgatgagattcaaacgagaataacatttatctcggatgttcgattgtgacccgtaatatatcgagaggctcgaaattgaaaactgaagctctgagaccatgaaacgacactagttcttaactgggatgtccgaatgagacccgtagtatatcgagacgctcgtaattgaaaacagaagctctgagctatctcaagcgacaata

SEQ ID NO: 13517 - DNA, 473 bp, Glycine max
  unsure at all n locations
agcttaggaagtatcaattgaggttaaaccccgctaagtgcaccttcggngtcaaatcagggaaattgctaggtttcatcgtgagccagaaagggatagaggtgaaccccgtatcgagaggcaggtctgaggtttcctgggacgtttgaattatattgccagattcatatcacagctcaccgctatttgtgagccgttgttcaaactcttacataaaaaccaaaccgtccgctgaaacgatgattgtcaagaggcattcggaaggatcaaaaagtgtctcataaaccctctcgtgcttatgccgccggtacccggaaggcctctcatcttgtatatgaacgatttggacgagtcgatgggatgtatgctggagcaacatgacgagtccgggaggagagagcgcgctgtctactacttgagtaagaagttcacggcctgtgaaatgaattactcccagctcgaaagaaacgtgt

SEQ ID NO: 13518 - DNA, 415 bp, Glycine max
  unsure at all n locations
tgatggagggagttgagatgatagaccttggtttaatgaccttctttcttggcatggagatcaaacaaggagaacatgaagtcttcatttgtcaaaagaagtatgccaacgagattttaaagaagtttaaacttgaagaatgcaaagaaatgagcactccaatgaatcaaaaggaaaaactntgcaaggaagatggaacgaagaagatagatcaagcatattttagaagcatgactgggtatttaatgtatcttacaacaactcgacctgatattttaaatgttgtaagcattttatctcaatttatgaattgtgcaagtgaaatgcatctcaaggctgcaaaaagggtgataagatatgtcaaaggcacttagcaatttggcatcaagttcaagagaactgaagagttcaagct

SEQ ID NO: 13519 - DNA, 409 bp, Glycine max
  unsure at all n locations
gatatttaagatggatgatcatgacagtctctagagtcttagaaagggtatattaaataggaagggaattccaattgaagtagcaaaaagtttggccaagaaatttaagttaaaaagtctttttcaacaaatttactctctggtaatcgattaccagtggccaaaactgatttacaacaactattaaaatttgaattcaaaatttgcactgtgtaatcgattacacatatatggtaatcgattaccagcagtttctgaacgttttaattcaaattntaaagcttgtaatcgattacacaaatactgtaatcgattaccagagcagattttcagaaaatattctcaatagtcacatctttntatttggttcttgaatggctatcacaggcctatatatatgtgacttgag

SEQ ID NO: 13520 - DNA, 502 bp, Glycine max
  unsure at all n locations
ttgctcanagcttctgttctgaatttcgagcatctccatatactacgggaaacaatcggacatccgagtaaaaaggttttgttgtttgaattttctaagaggttatgatttcaattttgagcgtctcgatatattacgagactcaatcaggcatccgagtaaaaagttattgtcgttagatttttcttagagcttctatttccgattatgagcgtctcgatatattacgagattcattcggacatccgagtaaaaagttattgtcgtttgattntgctcaaagcttctgttatgaatttcgagtgtctcgatatactacgggacacaatcggacatccgagtaaaaagttattgacattngaagttgctcantagcattcgtgtcaattacgagcgtctagatatattanaggattcattcggacatccgagtaaaaagttattatctgtttatttngctcagagcttctggtttcaatttcgagcatctcgatatattaca

SEQ ID NO: 13521 - DNA, 482 bp, Glycine max
  unsure at all n locations
agctttanaagaatggctaagaatttgttaaaacataagcacttagactatgaaggaaagctggagttgctgcacatgatgtccaacgttatgtcaaagaataagatcgggctgcacaatgcacaaggcaagataaagtgtcaaatgaagaattgaagctgcaggattcacgatgccggatacaatgtccaggacatcctgcctgaaaatactggaattgctaaaagcattgaagctgcaggatccacgatgtcggatacaatgtccaggacatcctgcccgaaaatactggagttgctaaaagcattgaagttgcaggatccacgatgtcggatacgatgtccaggacatcttgcccgaaaatactggacatataaatctgttatatctttaacagattattgtgcagntagcaagagattagatgatctatctttaggaacgaattanaagataattaaagttcgaattacaaactagaa

SEQ ID NO: 13522 - DNA, 415 bp, Glycine max
  unsure at all n locations
ttacggacactataaaactaagctggtatgcatgattggatgtttatgatcctcanagcttggatgttgngaaacataaacttcctcttcaacgtatccatttaggaaagaacttttgacatccatttggtataacttgaaacccataacacaagcataagcaagtagtaatcttacggcctctagccttgctattggtgcataggtttcaccanagtctataccctatcattggttatagcccttggctactagccttgcctcattcctaagtatcanaacatgttcatccaattaattcttgaacacccatttagtgccaatgatgttcatgacnttagaataaggtaccaattcccatacgtcaattcttttaaatggttcaactcctcatgcatggacattattcaaaact

SEQ ID NO: 13523 - DNA, 437 bp, Glycine max
tgcttggttggcgaaacagacagccattgcaatttaatatggcgattgggatgagtcatatgcgaaactttcgtcgtggctaacacacatgcaaaatcattctcctggatcatattttcaagtactacatgacgattttatcgttgggaatacggttagtcgcgaacaccgtcagtttcatagagttttttggactcttgggcaatgtaaagaagcttccaagtactggaagccaatcatacaagttgacggcacacatttgtacggcaaataccgtgggaccctcttaatggccacatcacaagatggaaatggtggtgtccttcctctagcattcgcggtggttgaaggtgagacgttgacagcgtggtcatgtgttttggacacttgcgtgaccacaaacccttgcacaggtacaaccctggatggaggaatca

SEQ ID NO: 13524 - DNA, 438 bp, Glycine max
  unsure at all n locations
atcattagtcaaaactaacattcaaggacccatgatnaattgggtaccaaaatcaaaatatgattatatgaatgaaggactccttgaagaaaagttggtacattgatagcggttgctccaaacatatgacgggagatgcatcaaagtttattcatatttctcaaaaaaaatagtggacatgtgacctatggagacaacaacaaaggtaaaattcttggagttggaaaaataggtacaaatccttctacctccatagaaaatgttttacttgttgatggccttaagcatagtttattaaatgttcttcaattatgtgataaaggctttttggtatcttttgattctcataattgcttttgatgagactaactctnttatgccaagaaatggtactactctattaattcattataaatggctgaatgttnttcttctctc

SEQ ID NO: 13525 - DNA, 462 bp, Glycine max
  unsure at all n locations
agcttcaagctagttntatccacatagtggatatcttcccaaagacaaacttgggagtttactcaataatcatccaaaaacactttttccaataatttagttttctcattgaatttcaatgcatttggttatatgaattaataaaggagaataaatgaaataagaaaaaaattattgtttgatttgtaaatgaaactgaaatgaaataaatgtttctaataagttttaatattgttttaagcaaaagtgtgggcaacaaaaggatatactttntagaataaaaaatacattnttttaatttgtcagtatatctttatgagcatttanattgcaatattttgttctttaaggatatctaagttatttctattaaaaaaggatatctaagntatttaatgaacatacctcttctttttccttattcaactaaataggaagaagacaaaattactcttccttttt

SEQ ID NO: 13526 - DNA, 416 bp, Glycine max
  unsure at all n locations
ngaaggagtttcatgcatcagggaacaatntcactntataagtgggtcccaattggcttcctaattntcagcttacctctttggatgtgagatcgtggcagtaaggtgccaattttccatcatggattcagtcacaaaacaaacttcaagatgttggactgtctaacacggngattttagattctattcccatacggatgtgagaagcactntctcaggttttgtatttaaacctctcttacaatcatatccatggtgagcttgggactacattaaagaatccattatctatccatactattgatctaagctcaaatcacttatgtggtaaattatcctatctttcaagtgatgtgtttcggttagatctttcaagcaattcattctctgaatccatgagattagaatttctgaat

SEQ ID NO: 13527 - DNA, 481 bp, Glycine max
  unsure at all n locations
gtaatcttganattcaagacaacactctgatttctgaggtttttgngacaaaaatggtcattgaccagtccattttccatgacttaactaaattaaccagtgacggtgtaccatttgaaggtacactgaatgacgactagaaatttgatttctctgcccatgatgcccaccagttggtttgcaccaacaatgcggatatgaccggacgtcttcttaccgggtcattggcttttgaaagccgcatccttcactatttaattatgcgtattctgcttccacggtcttccaaccttgcccaggtttctgaggaagatctaattatcatgtgggccttccatacagggcgtcaactcgactgggcacacttagtcagatatcgcatgcataaggcattgcgattaaatgctccactaccatatccacagcttggtactctatntcttcgtcattttgaaattcttcttgattctgaatcttatat

SEQ ID NO: 13528 - DNA, 410 bp, Glycine max
  unsure at all n locations
agcttaggctgagttctacttaccacccacagactaacgattagaccaagcgcactatcaaatccttagaggacctcttgagagcctgtgtcttagagcagcggngtagttgggatggtttcttacccttgatagagtttacatataacaatagtttttactccagtataggtatggcaccttacgaggcgttgtatggtagaagatgtangacacctctatgttgggtagatctaggtgagagcattgccttatgacctgaggtggttcagcagaacactgaanaggtcaagttgatccaatagaggatgagagtagcccaaagtaggtagaagagctaccatgtaggaatagaaagggaccttgaattgttgaggtgatcatgtattcctgagagtcactccatggac

SEQ ID NO: 13529 - DNA, 450 bp, Glycine max
agtcttgatgcaacatttggagaggttaatgaaacaacgagatgatgcgctccatgagagggtggatcaaatggagaatagagatcataatgaagaagaaaggaggagaagagggaatgatggtgttcctagacaaaaccgaattgatggtattaaactcaacattcctccatttaaaggaaagaatgatccggaggcctacttggagtgggagatgaaaatagaccatgttttctcatgcaacaactatgaggaggaccagaaggtgaagcttgccgccacggagttttccgactatgctcttgtgtggtggaacaagctacaaaaggagagagcaagatatgaagagccaatggttgatacatggacggagatgaaaagatcatgaggaagcggtatgtgccggctatgtactcaagggacttgaaattcaagctccaaaaactaacc

SEQ ID NO: 13530 - DNA, 467 bp, Glycine max
gctgatgaaactgatgcttggtaacttggaacctaactgtccttgaatcacaaatctatacctgatgcaaggtttgtggtttgtgctcctctgctgaccaccatacagacctttgcccttccatgcagcaacctggagcgattgagcagcctgaagcttatgctgcaaatatttacaatagacctcctcaacctcagcagcaaaatcaaccacagcagataaattatgacctctccagcaacagatacaaccctggatggaggaatcaccctaacctcagatggtccagccctcagcaacaacaacagcagcctgctccttccttccaaaatgctgctggcccaagcagaccatacattcctccaccaatccaacaacagcaacaaccccagaaacaaccaacaggtgaggcccctccacaaccttccctcgaagaacttgtgaggcaaatgactatgcagaacatg

SEQ ID NO: 13531 - DNA, 431 bp, Glycine max
  unsure at all n locations
agcttaatgaccctcaatctttcaatgattatatatccatctcccttatagggtgtgtctataaaatcgtggctaaagttctggccaagaggctggcccttgtgttacctcatcttatagatgaaagacaaacggattttatgaaggggaggcacattcttcatggtgttttgattgccaatgaggttatagctgaggctaaggctagaaataaaccttgcatggtcttcaaagaggattttgaaaaggcgtatgattcggtttcttgtggttttcttgactacatgttgatgaggatgggctnttgtgaaagatggaggaaatggattaatggtttcctgtccactgcaaccatatccattttaattaatggaagtctgtttttggagatgccactcaacataatggtagaaccttataatgtatttgag

SEQ ID NO: 13532 - DNA, 424 bp, Glycine max
actcaagctgaggaaactagatgccttgggtaacctagtaacccaactggccatgaataaaaaatatgcacttgtcgctagactctgtggtttatgctcctctgccgaccaccacacagacctttgcccttctgtgcaacaatctgaagcaattgaacagcctgaagcttatgctgcaaacatctacaatagacctccttaacctcaacagcaaaatcagccattacagaacaattatgacctctccagcaacaggtacaatcccgggtggaggaatcatcccaaccttagatggtcgaatccttcacaacagcagcaacaacaacaacaaccttattttcagaatgttgctggcccaagtagaccatacgttcttccaccaatccagtagcaacaacaacaacagccctagaaacaacaaaca

SEQ ID NO: 13533 - DNA, 502 bp, Glycine max
  unsure at all n locations
ngcanaccgacttcaactccaatggtttctaatctcaaactcttggcacaaganagccttcctcatctaatctcaaactcactacttttggtgactcaaattaggcctcttgctcagattcttgaaaatcagtcattggattctcaatattctttggcccttctcttatttcatggagatcaaagaagaaatctactatatgctgatcctccttcgaggaagattacaaggctctcgcatcaatgatatatgaaacataatggatactttacctccttgaagatctacataacctcggccaatccggtgtctttatactgttgagtctatggatcaattagaacattcgtagtacgcctttacatccatcattgtctcactctttcctttcanagttggacatgtatgatatatatagctcagcttgcaggagggtgtatctgatgatacatanaatagtactaaaactcaattntaatagatatgtcaataatcaacaata

SEQ ID NO: 13534 - DNA, 422 bp, Glycine max
tatagatactcaagcttcaacatcagaccacttccagtgtgctggaactacttcacatggacttgatggggcctatgcaagttgaaagccttggaggacagaggtatgcctatgttgttgtggatgatttctccagatttacctgagtcaactgtatcagagagaaatcagacacctttgaagtgttcaaggagttgagtctaagacttcagagacataaagactgtgtcatctagagaatcatgagtgaccatggcatacagtttgaaaacagcaagtctactgaattctgcacatctgaaggcatcactcatgagttctctcgagtcattacaccacaacaatactggttagttgaaaggaacaacatgactgtgcgagatgctgctagggtcatgcttcatgccacagaacttccctat

SEQ ID NO: 13535 - DNA, 413 bp, Glycine max
  unsure at all n locations
agcttgagcnattcaaacgacataacttttactctatgttcgattgagttcagtaatatatcgagatactagaanatgaaaacggaaactcgtagaaagtgcataccgcaatcacttttaactcggatgtccgattgagtctcgtaatatatcaagacgttcgtaatggacaacagaagctcaatgaaaattctaacgatattaactctttcctcgaaggtacgattgagtaccgtcatatatcgagatgctacaaattgagaatagaagctcctagcaaattcaaacgacgataactttttacttggatgtccgattgaacacggtaatatatcgagacactcgcaaatgagatctgaagctctgagataattcacacaacaataactgtatacacggatgtccgattgagt

SEQ ID NO: 13536 - DNA, 499 bp, Glycine max
  unsure at all n locations
aagttcctcagctgacttgagtagattgagacatattcttccacccaagacttgatatcatcccatatctctagcccatcagaagcataaggatagtcctcgatcaaaagtcaaactccatggggagcagatggatccttaacagcaactcctctgaattaaaagcacccaaataacattgattagcataagagttatatcaagcctgaagccttttttcttcttatgtcattgatgactttgtatatcatgcattcatgtgccactactctgtcaaagccatgaactgtcaaagccatcatttatgatgaaacagtctttgtctttccaaaatctgaaatacgagccacttgagcatctgctaaacgatatttcgtgccaccaatagtaacctcagatgatacagtctgcacatccaacacaatataatccaccaattgtctactagtaagtaatgacttgaaggatgctctncagtactgatcaacatctatgaaac

SEQ ID NO: 13537 - DNA, 392 bp, Glycine max
gtttcacgaatgtcatgtgctcatgcaacaattgttaaccgtggctatacgagacatcttgccaaacaaagtcaggttcacgataactcgcccgtgctttttcttccatgctatatgtagcaaagtgattgatccagtaatgtttgatgagttggaaaatgaggccgcaattatactgtgccagttggagatgtattttccccctgctttctttgacatcatgattcacttgattgtgcatctggtcagagaaatcaaatgttgtggtcctatttatctatggtggatgtacccggttgagcgatacatgaagatcttaaaagggtatacaaagaatctatatcgtccggaagcatctattgttgagaggtacattgcagaagaagccattg

SEQ ID NO: 13538 - DNA, 447 bp, Glycine max
  unsure at all n locations
taccctgatgaggatgtcccatatgttcttatnactggactaatccatttgcttccagagtttcatggccttgcaggtgaagacccacacaaacatctgaaagaattccatattgtttgctccaccatgaaacccccagatgtccaggaggatcacatatttttgaaggcctttcctcattctctatagggagtggctaaggactggctatattactctactccatggtccatcacgagctgggatgacctcaagagagtattcttatataaaaatttccctgcttccaggaccacgaccatcagaaaggatatttcaggtattagacaattcaatggagagagcctatatgaatactgggagagatttaaaaagttatgtgtcatttgcccacaccaccaaatatcagagcagcttcttctgcaaatattttatgaacgactcagt

SEQ ID NO: 13539 - DNA, 365 bp, Glycine max
  unsure at all n locations
agcttaaaccaagtagntatctggtttttttaattgnggnngaagcctgaaggcatccattatccctaactatcctggatggttgcaaatactgtcctaagtactacagaaacaagaagactgacagtgtaacgaagtaccacgtctctcaagagaaataacaagcgttgaagactaaactataaataaaaacattatttcattgtacaaagcatacctttcttggccttttggctaagatcaagtgtagtatctgttcttatcagtttaatatttgatatgtggaccattggttcacacgatattaaattaattttttgagggggagggtccattatagtagctggctactggggctctcacgt

SEQ ID NO: 13540 - DNA, 438 bp, Glycine max
  unsure at all n locations
gcttgataacaaaatcagcctcctccatccttgtattattgtatacatgttgggcgagcgttgtgttacccaccccactcatgcccacaatagaaattattgatagctgcttatagttgccagtttcatatgtgagccaattaatgatcatttctttgccatcatctctgacataaataacactttcaaccaccaaagaagttgatggcattttctgtgacacttgactgcttgatcctactcttaacatcggtaccttntaatatacagcttttcaaagtgggcaatctttccccagtcttcgccttctggtctctggcaacgctgtttgagcaatggacaacccgaaattccaagagttcaaatggaattgggcacaccctcctctggtaagcattggaggctgcggcagttttcaagcctcaattccttgagaga

SEQ ID NO: 13541 - DNA, 455 bp, Glycine max
  unsure at all n locations
gacacccgaacttcacaagccatctatatatatctttgaatgaagaataagtccaaacctatatagatgatcaacttgaanagggagatgaaatctcaccagcactcaccaaagccatcgaagattctcatgtatatattctaattttctcagagaacgatgcttcctcaaaatggtgcttgggtgaactcatcaagattatggaatgcaagaatgaaaaaggacaaatggtaataccagttttctacaacgtagattcatcccatgtgaggaagcagacagggagctgtgagcaagcctttgaaaaacatgagggagaacctatgtgcaagaaatggaaagctgttctcactgaagcattcaatttagctgggtggaactctcgaacttataggtaagataataaaatggaatgagtgattaaaatttctgaaagaaaaaatgagaaagacaat

SEQ ID NO: 13542 - DNA, 445 bp, Glycine max
  unsure at all n locations
gcaagctngagtgaactntgaataatatgaaaacttttatctttctctacgatctcacttttaatgttgtgatatgcctacttatacgtaactgtacattttatttctagtaagcaattatgtatttatcacttaggtagcttgattagatattggcaaatatgttattaatttcgtttgaactttgtagtctattcactgtaatcagtgttatgtatgttatatttcatgaaataatgtatgtattttacttctagactctgttgacatcatttatttggtatgggattttataataatattaaataatggtgtcttttatgttcagatgtctggtgagnttccatgtgctacttctgatgctcaatctatgcaaactacatctataggtcaatccgaaaaggttcactcactttcatatgctgatccacagcaaccaggtatt

SEQ ID NO: 13543 - DNA, 434 bp, Glycine max
  unsure at all n locations
tcttcttcttcattatgcgacgatgaagcatgttcttctccggcgtggacacccacacctcattctctgatatcgggccactgacatgggctgcggngggtccaaggtggaggacttccccgtggtggttctgtgcagagagcgaaaggcgttcctcaaagccgcatcagagcaacgctacgctctcgccgctgcacacgtggcgtatttccattcgctgagtgaaattggcgacgcccttcacaagttcgccgaacaagacctcaccaccaccaccggttcctcctctccggttctcacattaccctcggaaaccaaaagcatcaacaataacaaactctcatcctcttccccttctatagcatctaatgaaaaaaaaactatngaaaacaaaatgaatggcttaattcactagtcagcctatagttgttcat

SEQ ID NO: 13544 - DNA, 450 bp, Glycine max
  unsure at all n locations
catgcacaaagtgccagtgagttcgacttatcgtgtgtcacaatggccagagaagtggccagcaagactaaccaacataccttattggttgacaaattctcaagttggagtttatggaaaacctgcccctgaagattttactgctgattatggacactggaaacgtatagtgtccaagtcttatcttaatgggataggaattaattggtccaatatgcggaatgtcatggatatgagatcagtctatggagggtgagtgaaatttgttgcttcccatgttactctgaattatattaaccggccattntgacatacttcactttgtttttgggctacaggtttgctgctgccttgaaggatatgaatatttgggtcatgaatgtggtttcagtaaattccgcagacacactttctcttatttatgagcgaggtctctttggcatgtatcat

SEQ ID NO: 13545 - DNA, 483 bp, Glycine max
  unsure at all n locations
agcttgcttgagaagctagagggagggttactctcacccctccaatagctaagctcacttacatgccaaaatacatgaaaatacaaaaaaattctatactacaaagactactcaaaataccctgaaatacaaggctaaaaccctataccagtagagtacccttaacttgtacccttaatttgtagggtaccctacaaacctaaaatggccaaaatacaaggcccaaaagaaggaaaacatattctaatatttacaaagtggactcatacttagcctatgggctcaaaatttaccctaaagctcatgagaatcctagggccttctcctgcatctctagcccaatcttcttggagtcttctatccaatgcccttggggggtaggattgcatcacataacctctatggagacnagatntggaactttgcatatctcctctaagcgtctaagttggtcgacatctattatattagactgattagcat

SEQ ID NO: 13546 - DNA, 435 bp, Glycine max
actattatactcagcttaacattatactctgagcgtctcgatatattacgggactctatctgacatccgagtaaaaagttatttggcgttgaattggctcataggctcaaaattcaatttcgagcgtctcgatatatttcgggactcaatcagacatccgagtaaagagttattgtcgtttgagttggctcacaggttcaacattcaattgcgagcgtcccgatatattacgtcactgaatcggacatccgagtaaaaagttatagtctgttgaatttgctctgagcttcaacattcaatttcgagcgtctcgatatattacgggactcaatcagacatccgagaaataagttattgtcgtttgaatcgtgtcataggttcaacacttcaattcgagcgtctcgatttatgactggactcaatcagacatccgag

SEQ ID NO: 13547 - DNA, 281 bp, Glycine max
  unsure at all n locations
agctntgagccaattctaacgaataataacttttactcggatgtccgattgagtctcgtaatatatcgacacgctcgaaattgaatgttgaagctctaagcctattcaaacaacaataacgttttactcggatgtccgattcagtgacgtaatatatcgggacgctcgaaattgaaagtggaacctctgagccaactcaaacgacaataactttttacttggatgtctgatagagtgccgtaatatatcaagacgctcgaaattgaaagaggaacctcttt

SEQ ID NO: 13548 - DNA, 488 bp, Glycine max
  unsure at all n locations
nngacattaaatntccctctaatattaaaagccaataaataattaaattagccaaaaattaaaanaattaaattttttcttaatatacatttgattaaatattaaatttccttttaataattgaaaacacttaaaatatctttaaatgataaaatgctagtcaattattctaaaataaaaattattaaattaaattaattntaatcttatccaatattatattttttactaaacacttttcattcattcatgaactaatctactatccaaaattattaaatagcattattcaatttaatcaattcattaattaatcatgatactataagtgagacaattttttatttaaaaataattataattntttaggtatgacattaaataattaataattaanaaatgattcaagactaanaggattcattacaatattcanaatagtccatcgaatcttccatgacannatagtcaatgactaactcaatatc

SEQ ID NO: 13549 - DNA, 440 bp, Glycine max
  unsure at all n locations
ctccaacacttaagatacttagctcgcacttccttagccaatcttatgtcggctaaacggacttcatacttgacttgattgttcatcgtcccaaacttgaaccttagggattgctctacgattatttcatttgggctttctatgatgacaccagtcctactccctttttcattggatgaacccatctgcatacaaattccaccactcggattgtagctctgtagttgttgtcaattcgacgatgaagtctgctaagcattgagccttcgttagatcccttggtttgtacttgatcccaaactcgaacaactagaccgactaacatatcattcggtttgcaagttctggtttcatcatgactgttaagatatggtggttggcttaaactatgatttgatgactntggaagtatggtcttagtctcctagcaactgtgacta

SEQ ID NO: 13550 - DNA, 391 bp, Glycine max
  unsure at all n locations
tccttaatcacctcattaaggactagaacaccatgtatgatgtgtctgttttttatgaaagttgtctgcctctcatcaataagaccagatatcacttgtctcaatctatttgctaataacttagctatcaccttgtacatacatccaatcaaggagatgggtctgtagtcatcaaatgactggggatgtttaattntgggaatgagagctatgaaggaagcattactgcctctagggaaactgccatgtacatggaattcatcaacaaatcttctgaagtcagctntcagcatatcccanaattctntaatgaatttgaagttgaaaccatcaggtccaggacatttgtccccatcacaactccatactgcttctttgatctccaaatctg

SEQ ID NO: 13551 - DNA, 413 bp, Glycine max
  unsure at all n locations
ttttttcaattttgcttcaatattccttcaaagcactagaaatcttcttcttttaacttctgctaataaaaaactgcaaagatattaatntctttattatttcattaaanacaacaatgaagtaaagaacttgcaatcattcttagccaaaatngactatcaaattaactcaaatntcgtagttatcattgtgttatacagaaggaaaacacatcaaactcaacgttaaatattcaattntatagatatagaattctgtgttgatcaaatggtgatcgatcttcccttttgtttaactatatgtataaaaaaataatttatatattaaattatatgactccctaactataatctacttntgaatgggaaaaaaatatgaaatactatccactaactcactaccctttcatcaa

SEQ ID NO: 13552 - DNA, 388 bp, Glycine max
  unsure at all n locations
tatacttaacagaaatacatataacattacataataaccacatatcgcgagagctcgatacaatntatacaagttttatacacaaaagttagtcattttcaccgactaacacctggctagcccagaaaactcctaatcttaataacagaattaggactctcccactcaagaatggcttctatcttagagggatctacaactatacccncttgagatatcacatgtcctagganactaactntctctaaccaaanatcacactttggacacctataaataaagttgtcgtgtcctaaaggtatgcagcataatcctcaagtgttcttcatggtcctctctagtctgggagtatactaaaatatcatctatgaatactaccacacaacta

SEQ ID NO: 13553 - DNA, 216 bp, Glycine max
  unsure at all n locations
aacaatatttcttggatacttctccccganataaaacatgtctgataatgagagatcacatcnggcatgacagggtttaaccgattaactaagatcttagttaagatcttataagctatgctacacaaggagatatgtctgaattgactaacacacttatgctttgcacacttaggaattagacagatgtcagtcatatttaccgtactaacctca

SEQ ID NO: 13554 - DNA, 198 bp, Glycine max
gaacaatggaagctctcgagaaattcatattgtcataacttctcactcagaggacccattcatgcggataatatatatagacgcttcaaattgaacaacggaagctctcgagatactcagatggtcattacttttcatctggaggtcctattcaagcgcatcatatatagagacgcttcgaatagtcaacggaagctc

SEQ ID NO: 13555 - DNA, 353 bp, Glycine max
aatcatgagtcaacacataaagaactttatctttacacggtgcataaatccttatggcaactctcatgtagtcaatgacgacaaagaaagttgcatactatggaatgaatctggtgctatgaagagcagtaccattacagattgctctcattccatgttctgtatcaccaaatgtaacattgcgctcttcaatagtattcttttggtgatctccatatgatttcaacaaggtcatgagggaagaggcaagatctacaccgccactgagtagaccaagaagaaccttaagacgcgcattcagattttgttgagacagatctcttgtaacattagcagggttttctggagtgtat

SEQ ID NO: 13556 - DNA, 408 bp, Glycine max
tgctctattggttggcgagttggtccattctctctaagtctattcgaatcatgagtcaacacataaataactttagctctacacggtgcataaatccttatggcaactctcatgtagtcaatgacgacaaagaatgttgcatactatggaatgaatctggtgctatgaagagcaataccattacagattgctctcattccatgttctctaacaccaaatctaacattgcgctcttcaatagtattcttttggggatctccatatgatttcaacaaggtcatgagggaagaggcaagatctacaccgccactgagtagaccaagaagaaccttaagaggtgcatttagattctgttgagacagatttcttgtaacattagcagggttttctggagtgtatgtcggaagt

SEQ ID NO: 13557 - DNA, 314 bp, Glycine max
cgacaatatcgttttactcagaagtctgattgagacccgttatatatcgagacgatcgaaattgaattctgaagctctgagctaattcaaacgacaataactttttttctcggatgtctgattaagtaccgtaatacatctagacgctcgaaattgaatgatgaagctctcagcaaattcaaacgacaataactgttttactcatatgtctgattgaatcccgtaatatatcgagacgatcgaaactgaattctgaagctctgagctaattcacacgacaataccgttatgctcggatgtctgattgagttccg

SEQ ID NO: 13558 - DNA, 342 bp, Glycine max
  unsure at all n locations
ctgcagctcaacatgaattagagcgtctcgatatattatctgactcaatcttacatacaagaaanaagttattatcgtttgaaaatcctcagagcttcggtattcaatttcgagcgtctcgatatattacgggactcaatcagacatccgtgtaaaaagttattgtcgtttgaattagctctgaggttcagaattcaatttcgagcgtctcaatagattacgggactcaatcagacatccgagcaaaaagttatttgccgttgaattagctcagagcttcagaattcaatttcgatcgtctcaatatattacaggactcaatcagacatctgagtaaaaacg

SEQ ID NO: 13559 - DNA, 431 bp, Glycine max
  unsure at all n locations
agctnttagaaatcttcggtgtctggtatataccgtcttctntccatgcttgagttggatgaagcttgtgtttttctcaaatataggacatgcatgatgccctttcccactgtatccacttaaatttccatatgctagaaaatcattaatagtacaaaacaccattgtgcgtaacctgaatgtctactgcacatttgcatcccacacatctacctcttcttcccacaattgtttcaagtcttcgattaatggcgtaagatacacatcaatatcattccctggctgccttggacccgcgatcatcatacacaggataatgtatntacgcanaatgcacaaccatggnggaaggttgtaaatcatcagtaaaacaggccaggaactgtggttgctgttaagctaccataaggattcattccatcagaagcaag

SEQ ID NO: 13560 - DNA, 482 bp, Glycine max
  unsure at all n locations
gcatatggatcttnttggtccttctagaactatgagaattggtttaaattattatgctcttgtcatagtagatgattattctaggtttacatggactctatttcttgctcacaaaagagatgcatttcatgcttttaagaaacttgccaaaatcattcaaaataagaaaaaccttaacattgcatccattagaagtgatcatggaggggaatttgagaataaaaactttgaattatttagtgatgaaaatgggatagaacataatttttctgcacctagaacccctcaacaaaatagagtagttgagaggaaaaatagatcattagaagaattagccagaatcatgcttaatgatacaaatattcttaaatatttttggaccgaggctattaatattgcatgttatataatgaatagagcattaattagaacctatttaaagaanacaccatatgaactataagaggggagaaaaccaaata

SEQ ID NO: 13561 - DNA, 505 bp, Glycine max
  unsure at all n locations
gcttgaagatgaacttcactagcacaatgcatgaactcttgaaagtatacttactgcanacaaaatgtcaggtctgngtgcagtaagatatattaagcaaccaatcaagcttctgtaatgcatttcgtcaactttatcagctccatcatccttgctaaatttctccttttagttcattggagatgtagtgcttttgcagtcctccatatngaaacttcttgagtatttcccttacgtacttcttttggtgaatgaggattccatcatgatcttngttcacctccattcccaanaagaaactcatcaagccaagaattgtcatttcaaatgctntaaacatttcagctttaaactcctttatgagtttctcatcacttcctggcacaagtaaatcatcaacatagatagcaataatgatntaaattgcatctaccaatttcacatatatggcagcctcacttggactttngacaaatccaagatcttgaagatgatcatctatcct

SEQ ID NO: 13562 - DNA, 508 bp, Glycine max
  unsure at all n locations
atctaagccaccgcggctgcagcttcactgattacacgttccaataattctaatggtgtaatctgttacaagatattggtaatcgattaccagtgtgtttgaacgttgaaatcanattcaattgtgaagagtcacatcctttcacaaaatgctntgtgtaattgttacaagaatttgataatcaattaccagtgacanagtttggacaaaaatcanaagatgtaactcttccaatggtttntcagtttttttaaaggttataactcttctaatggttatcttgaccagacttgaagagtctataaaagcaagaccttgacttgcattntaatattcattacaatctttgacaacctttacaaaanannatttcacatacctttttacaaccttngaatctctntgaacttcttcttcttcttcctttgccaaaagctntctaaaaagtttttggttntcaaacctaganaacaaaaagtgtgtattcatctttntcattctcttctcc

SEQ ID NO: 13563 - DNA, 342 bp, Glycine max
  unsure at all n locations
atgagcgtctcaatatactattagacacaatctgtacacccgagttaaaagttatggtcgnttgaatntgctcagagcttctattttcaattacgagcgtctcgacatattatgggactcaatcggacatccgtgtaaaaagtaatcatcgtttgatttttctaatagcttctgttcttaattccgagcgtctcgatatattacgggacacaatcggacatncgattcaaaagttattgtcgtttgaatttgctcagagcttctgttntcaattacgagcgtctcgatatattatgggactctatcggacacccgangaanaagtatcgtcatttgattttc

SEQ ID NO: 13564 - DNA, 471 bp, Glycine max
  unsure at all n locations
agctggggatgcatttgtgagttgtttgtacatatttattataggctntgtgttccatttcagtatgtttgtacatatattatccttattgtcttacgaagtagactcttacgagtctacgagtcgactctacgaagctgttacgagtctgcgtaaactctcgatattgataaccttgcaatatatatgtgttntaaaaatagttgagattataatacacataatacatatgcttggtattcacatgagattctaattgtaatatacatgttacaagagtgcatcagatgtatgacttaaattataactcatgttaataatatcatattatgcatgttagtttggaaaggtatcttcaatgacaactctagttactatataaatatttacttacaatattgtgcttatataattgagtccattagatttgctntctacattgtcttatatattcgaagtggttactcttat

SEQ ID NO: 13565 - DNA, 446 bp, Glycine max
  unsure at all n locations
cttcttatttccagaaggaaattctatcaatagacctccaatctttaatggagagggttaccactactggaaaacccgaatgcaaatttttattgaggcaatagacttaagtatttgggaagccatagaaatagggccttatatacccaccacaatagaaagaattacaatagatgcaagcacatcaagtgaaagcataacaatagaaaaacctagagatagatggtctgaagaggatagaagacgagtacaatacaatttataagccaaaaacataataacatctgccctgngaatgtatgaatattacagggtttcaaattgtaagagtgctaaggaaatgtgggacactctacaattaacacatgaaggaactacaaatgttaaaagatctatngataacacactaactcatgagtatgaactggttangatgaatgcaaatg

SEQ ID NO: 13566 - DNA, 422 bp, Glycine max
  unsure at all n locations
caaggcctgatcttaacactgctctatttgtgctgtcacagttcccacagacacaccttgctgaggcaagaatngcattcattgattcaagtactagtaggagtgtaagctatggtgaagctaaaaggtctatntactcccttgcatcagctntgttccatggacttgagattaggaaaggtgaatgttgtattgtattgtcaccaaactcaaccttgtactcagccatatgcctagctgttttatcagttggagcagttcttaccactgccaaccccatcaacactgcaacagaaaatgcgaagcangtgcatgattcgggtgctaaactagccatctcagcacctgaggagctacacaaatnggtcccaactggggttcctataattctcacttctcgtccttctgatggcaacatgtta

SEQ ID NO: 13567 - DNA, 457 bp, Glycine max
  unsure at all n locations
gcctaaggctgttcaccatgttgctcatgttgctcccnctatatttaacaatttccacctcaagacccctagttntattaaatcttgatatattnggtctaaccaaaaccctcttatttagtggttcaggggtaaaaggtatggtctagttgtggtggacgactactctagatgaacatggattatttttcttacccacaaaaatgagtattntagagtcgtctttataatttacaaaagaattcaaagtgaaaaaggagtatacattacttcaattagaagtgatcatggtggacaatttgaaaatgaaaattttcttctattatgtgaagaanatggcattctttgcaatttctcaacacctagcacaccccaacagaatgaggtagttgagagaaagaatagatcattgtacgaaatggaaggaccatgcttagtgataatttacacctaaaca

SEQ ID NO: 13568 - DNA, 325 bp, Glycine max
atggtctaaacttatcagacggaagtccgattcaggcgcataatatatcgagaagctcggaatagaacaacggaagcactcgagatattcaaatggtcataacttttcacacggaagtccgattgatgcgcataatatatcgagaagctcgaaattgaacaacggaagctctcgagaaactcgaatggccatcacttatcacacggaagtccgactcaggcgcgataaatatctagacagtcgaaattgaacacggacgctctcgagagattcaatggtcgtacttatcacacggatgtcaacttaagcgcaaatatatcgagac

SEQ ID NO: 13569 - DNA, 447 bp, Glycine max
  unsure at all n locations
atcttggtcatcttgttataatacgtggtcttccttttttgaagttgatggcgcaacatattactttggcctaacaggaactccaatattattacagcttctaatgttatgattggtttggccacaccttccacatgtaaactcagccaatttcctctttagcttatgtcctgtgacattgtcctcatctacagatctccttctatttttctttggcctttctctctggacccttctatgtggtggaacagggtgtgtatactgtgtctgggcccaatattgtggtccttggactggttcaataaaatgttggtatgtcttattataaacttctattgacagncactcatgacacatgtnctcaggcttcccttctttgtgagttatagttgcaatggcatgtcggcatggcatccctacatcatagttgtataatcagcacacatg

SEQ ID NO: 13570 - DNA, 472 bp, Glycine max
  unsure at all n locations
gcttgtccactntgcttctctgccatcaccttgaatttctagannattgttaacacgtcatctttntccttgatcaagtataaccacatcattctgttgtgctcatctacaaatgatgtgaagtacttgttcccacctagtgatggtacctcaaaaggaccacacacatctgaattgcacaacaccaagtaccactagaaagcttctcattggggcaaatgggaaacttaaaggaactttcttggttgcttgccaatgagacacacatcacacaccttctntgctacatttaattgtggcagacctataaccatattattaattactaacatattcacaactttgatattttagtgaccaaacctgagatgccaaagccagctcaatnggntaatctctatagtcattaaacacttgtactttgatgccttaatgntggcttgaaaggttatatttcttgagagtggagatc

SEQ ID NO: 13571 - DNA, 484 bp, Glycine max
  unsure at all n locations
agcttctatagaaggttcgttcctaatntctctacatttgcatcacctctcaatgagctagtgaagaagaatgtggcatttacctgnggtgaaaaacaagagcaagcctttgctntgctcanagaanagcttactaaggcacctgttctagctcttcctgactnttctaaaacttttgagctagactgtgatgcctctggagtgggagttggagctgttttgttacaaggtgggcaccctattgcttattttagtgaaaaacttcatggtgccacccttaactaccccacctatgataaagagctttatgccttaataagagcactccgaacttggaaacattaccttngttccaagggaattgccattcatagtgatcatcaatcacttaagttcattagagggcaaagcangttatacaaaaggcatgcanaatgggtagagtacctagagcaatttcccatatgtatcanatacaaaaagg

SEQ ID NO: 13572 - DNA, 422 bp, Glycine max
  unsure at all n locations
gacgtncttgattaattaattattgtattatctagtgttatactaactaanaaaaacttataaaatttcgtataagtaatgtacaaatccaaaaataattgataaacaaaatcatattgaattcaagtcgttaaagcacaaagtatatcaaaagaaaataaaaagagcatgatattaaaaaatgtatggattaggtcctcagccccaaagcttacaaatctantttaagtccaagcccataaacaaaataaaataaaatctggacaagataagataagattggatgaaataaaatctggacgaaataaaatttagatggaataaaatctggataatataaaatctagatggaataaaatctggataagatatgattcgataaaatgaagctgtattattatattattattatattattatta

SEQ ID NO: 13573 - DNA, 489 bp, Glycine max
  unsure at all n locations
agcttacaaccnnctgttcattactaaacaaactattattaatcacaatcacaatcaagatatcctaactacatgcaagaggtaataatgaaaatagaacagggaaagaaaagctatgttgcctcccagtaagcgctcttttaacgtgactagcttgacgcatcgtcctgttatccaggaacctagagagttcctacttcaaggaccttcttctcaggtctcttttcctccatcacatgcactntaaaataaacattttggctaggtggatccttgttctcctgaaacaaatcaaagctgatcttctgatcttctatgcccatccgcagtatcttttttcccatgtccaccacacagcttgcagtagacatgaatgggcggccaagaatgagaggaatgtcagcatcctcttctatgtctatgacaacgaaatcagctgggaatataagggtgttaaccttcaccagatcattcttagtcgatgaatac

SEQ ID NO: 13574 - DNA, 436 bp, Glycine max
  unsure at all n locations
agcttangcacattanggacacatattctatctcatagtctcatgactccatttgatcccacatataaactaccatctttccctgacactatagnctttaattgagtcttntgcaaaggatcagacttttggccctctctgatctctcttaacaacttaccagtaatcctcaaagatccaagtctcatactattaagagtgacctcacacgcaaggccaagggctctaaattgttctaggagatctaactcccaatccatcaaggcagatatatgtatggatttccaactcaaggcattagccactacattagctntgtcaggatgataactaagctcaaaatcataattcttaagaaactntaaccatatcctctaacgcatgttcatctctttctagctaaacatgtacttaaggctcttatgatcgctaaaca

SEQ ID NO: 13575 - DNA, 412 bp, Glycine max
  unsure at all n locations
agctntatcatatggatgtataaagcgcattcttatttggctntattcaagaggaagtatatgtagatcaaccccctgtatttgaaaactcagagaagcctaatcatggttttagattaaaaaaggctttatatggcttatagcaagcccctagggcttggtatgagcgtctgagtaagttccttttagaaaaggatttctctagaggcaaagtagatactactctnttcataaagagaaaattacatgatattntattggttcaaaattatgttgatgatattatttttggatctactaatgaattattgtgcaaggaattctctcatgacatgcaaagtcagtttgaaatgtcaatgatgggagaacttaatttcgttcttggattacanattaaacaaaccaagactag

SEQ ID NO: 13576 - DNA, 491 bp, Glycine max
  unsure at all n locations
ctgcagcttctcaaatcaatttcgaccaccatccattattttctactcttcttgtttcttattggggaaaatcttctgagccacaataattctgtcaccactttaatgaccaggaacaaagctagattaaaaatgatgtttcaacttacttatatagggtctaatcctcanagagagtaacccgataatcacattatatgtcacattacataaactaataggcttaaaatctttcataagactaacctcatctttcttaggaatgagagtgataaaggtctggttccttctgaaattgcatgaagatttttaaaanaatttcggacaaaattgtagaggtcatcaccaaccacaactcaatacttgtagaagaaaactgctgaaaatggtttcaatgtaggtaccttgctgaanatgtatcagtcattanaagagcaatctanttatcccattantgtgtatgtngaaatccgagttatgcacttgattac

SEQ ID NO: 13577 - DNA, 479 bp, Glycine max
  unsure at all n locations
tcttcttcatcaatggagttctttgcttgttgtattttaatggcagtggagtgaagaaggaataaagatgattagagatgccacttcaaggagaagatgagtcaagaagaagttcaccaccatagggagccatggataagagcttgagggtaggagaagaagaatagagggagaaagagatagggagcatgaaatttgtgcctcanaagaggtctgaactntgaagtgtaattcttcaatgaataaagttgaaaaaatgcacacacatgacctctatttatagcctaagtgccacacaaaattggaggaaaatttgaatttctattcaaatttcacttgaagtttgaaatgaatntgtggagccaaaatttcactagttatgattagtgaatttcagttatggctcagcccactaatccaagatcaagtccaagattctccactaagtgtggttaggtgtcatgaggcatgttaagcat

SEQ ID NO: 13578 - DNA, 495 bp, Glycine max
  unsure at all n locations
agcttacaaatctgttntaagtccaagcccataaataaaataaaatctagataagataagataagacaaaatctagatgaaataatatctagatgaaataaaatctagataagataatatctagatcatataatatctagatgagataaaatctagatatgataagataaaatcttgattaaataatatctagatgagataaaatctagtaagataagatttggtagaataaaattgtctgttctcttcaagtccaagcccaattttggattcaaacccaattacttataattctcctgaaattaaattaaaaacacaaaattaatccagtaggcccaagtgataaaactgcataattaatttgaccattaaggctaatcagtaattaaaatggtgacaaaaaggggtaagaaatatgaganaatgatgacacatcattcatgtttcatacttcatatggcatggaaatagtataaactntntcagtaagtactc

SEQ ID NO: 13579 - DNA, 473 bp, Glycine max
  unsure at all n locations
atattgatttctntaatttgcacaccatgtgtttctgtccttctactgagaaccccattgactaatccatataaacattctcatctaaatatccattaagaaagagagttttcacatccatctgatgtagctccaagtcataataggctactaatgtcatgataatcctgaaagaatcctttcgtgaaaccagggaaaatgtctctntataatcaatgttatctttctaagtaaacctcttaacaacaagtctagccttgtaacgttcgaagttggcatgagagtcacatttagtcttgaagacccacttacaaccaactctcttacaaccctttagcaattctataaggtcccaaacaccattatgttccatggaatnntattttcccttcatggcatntaaccagttctcanaattatcacaacttacagcttgtgaaaacgaaactggatcattatcattaatgcttaag

SEQ ID NO: 13580 - DNA, 315 bp, Glycine max
gacccttaggggctatgctgatggcttcttaccgtcccaagcttcaattggagacttgtctttacagacttagtaggacatctggtgagtatgtaaactgcagtgtagactgcttcagcccagaatgtgttagagagtccctcttccttgagcatcgatctagccatctccataactgtgcgattctttctctcggacactcgcatttgttgagtagaatatgcgactataagttgtcgctcaatgccttcatcctcacaaaatctttcatactcgcgagaggtgtactctgtgccgcgatcacttcttagtact

SEQ ID NO: 13581 - DNA, 314 bp, Glycine max
  unsure at all n locations
acataaatntgcacattatccaactcattatttgttctctcgataaacaatgttatgtcaacttgacctcttacaaaagattgcccaataaagaaattgctcaatctttcataccaaggtctaggtgctagctttaaaccatacaatgcctttctcaacttgtaaacacgattatggtgttcactgtctacaaaacctagaggctggaccacatatatgtgttcttcaacgtatccattgagaaaaacactttgtacatacatccgatacaacctgatattcatactacatgcttaagcacacaacaacctaat

SEQ ID NO: 13582 - DNA, 468 bp, Glycine max
  unsure at all n locations
agcttaagctccttcaactgcacaaggctcttaatatttgaagagtatccttgtggaaccttcacctgacgaagacactgacaaaaacttatcttctncttcttggacaaagtatggcaggctgggggcaagtaaattntcttcccatcagaccttggatgcaactgtgatcttatacccatatcagctagatcttgacgggtattcaagccatccttcgtcttgccttgaatgttaaggagcatcccaatcacactgtcacanaacattttctccacatgcataacatcaatacaatgtctaacgtcaagatcacaccagtacggaagatcaaagaanatggacctcttcttccatatgcaactctgacttttatccttcttttgnngtcttccaaatacagtgttcaggtgttgaacccgctgatatacctgctcaccagtcaatggtatcggcgcaatatcatgc

SEQ ID NO: 13583 - DNA, 456 bp, Glycine max
  unsure at all n locations
gtcttgtaatcgattaccagaggggattttcataatattatttccaagtcacatctattcagatgttttatgaatgacaatcaaaggtgacttggaaacacgaatttaaagagacttttcattgcccaaacagctttatcctctcaaaaagattccttggtcaaccacttgcatactcaataaagaattttgattgatcttcattatacaatctatctcttttaagagagatttcttcttctcttcttcttatttctgacaagggattaagagaccgtgggtctcttggtatagaggactcctgaatacaagggaagggttgtccctgtgtggttcagactntgtaaaaagagtcttacaaagagaatggaatatctcaagtgggttgttgatgactggacgtangcaccagaagtggccgaccagtataaatcaagtttcattcctctcttccct

SEQ ID NO: 13584 - DNA, 336 bp, Glycine max
  unsure at all n locations
ttcaggtgctggaactactttacatggtcttgatggttcctatgcaagnngaaagccttggatgaaaaaggtatgcctatgtttgtgtggatgatttctccagaattacctgggtcaactttatcagagaaaaatcagacacctttgaagtattcaaggagttgagcctaagacttcaaagagaataagactgtgtcatcaagagaatcacgagtgaccatggcagagagtttgaaaacagcaggtttactgaattctgcacatctgaaggcatcactcatgagttctctgcagccattacaccacaacataatggcatagttgaaaggaaaaaca

SEQ ID NO: 13585 - DNA, 476 bp, Glycine max
  unsure at all n locations
tggtctcatcaaattatttattntctgtagggaattctataaataggccttctattattaatggtgtgggttaccattattggaaaactcgcatgcaaatttttatagaggcaatagatctgaatatttgggaagccatacaaatagggccctgcattccaactatggtggcaagaaatacaaccatagaaaaacctatggaagaatggagtaaggaggaaaaaagattatttcaatacaatttacaagccaaaaatataattacatctgctctaggaatggatgagtactctagggtatcaaattgtaaaagtgcaaaagatatgtgggataccctacaagtaacacatgaaggtacaacagatgtaaaaagatctatgataaatacattgactcatgaatatgaattatttagaatgaatccaaatgacagcatacaggacatgcnatagaggttcacacatataattaatcat

SEQ ID NO: 13586 - DNA, 439 bp, Glycine max
  unsure at all n locations
agtcatcaagagattataaatatgttaccatggcataagtttcataanaagatcaatcatcaatcatctttgaatcatctatctttcaatctttttcaacatcatctctcaaacatctttcaatcaatctttcaatatctttctacagaattttctgattcatttctcttcatctttctaaaaagtttttgatcaacactttctcttccaagaaaagttctttgttcaaaaacttgtgctattcatctttntcattctcttctcctttttccaaaagaacaaaggactaaccgcctaaatntctttgtgtctctcttctccctttgccaaaagaacgaaggactaaccacctgaattcttttgtctctcttctcccttacaaaagaatcanaggactaaccacctgagaattcttttgatcttcccttcccttaagaaa

SEQ ID NO: 13587 - DNA, 370 bp, Glycine max
  unsure at all n locations
ttatggacttaaacatgcaccgatgcaatggtatggtagacttagaaacttccttcttgaacaaaaatttgagagaggaaaagttgataaaacacatttcattaaaaagttctctcataacattttactcatgtaagtttatatggatgacatcatttttggttctactaatcgatctctttgtgaagattttgtacacaagatgcaggaggagtttgaaatgccaataatggggggggggattaaattactttcttggtctctatgtgaagaanattgaccatggaacatttctctatcanacaaagtattgcacagaacttctcaagaagtttaagatggacaaaagcaaggaggatgaaactcctat

SEQ ID NO: 13588 - DNA, 456 bp, Glycine max
  unsure at all n locations
tatgagaccaanacatgacatagaacatttccaacaatctaattctcacgttaatctagtaaatcttgtccaagacacaaacgaattatttagaaatgtttctcacagcatggggaacaaaacccctcaaatcattttacataatcatatcaaaatcaaaggaatcaaaatcataggttcaaaaacaagaaaacaccaagagtacttaattttatcaatgtagtcggtgctgtacaagacctgatattgcttatgtagtcggtgttgtgagttaattcttgtgtaattctaagaaggaacattgngctgctataaaatagatactcaaatatcttcgtagcacaactagcagtgtttgtgcttntataanggaaagcatgtgttagaaggatacacatatgtgggcatggctagagatgtnattctagaaatcaacatangatatctactacttta

SEQ ID NO: 13589 - DNA, 473 bp, Glycine max
  unsure at all n locations
cactcagcttggctcccaacactttttagactttcccaanatctagaagtaaatctaggatctctattagacactatgctagatggcacaccatgtagtctgagaatctcactaatatacagggaggctaacttctccaatgaaattttgatattaattggaataaagtgagtaggcttggtcagtctgtcaacaataacctagatagaatttaaacctatgagggtcctagatagtcctacaacaaattcatggaaatactgtccatcttccactgtggtatctctaaggattgtaacttacctgaagttctttgatgttctatcttagccttctgatagactagacatgcatacacaaattcactaacctctctcttcatgttgggctaccaaaacattgtctttagatcttgatatatctcggtagcacctgngtggatgctcaagttgtttctttgtgatgcaatccta

SEQ ID NO: 13590 - DNA, 447 bp, Glycine max
  unsure at all n locations
agctntggagaaccaagccaatcagaatgctagacgaaatatagatgggaatagaggtaacaatggtggtaatgacggaccgaggcagaaccgggttgagggagtaaagctcaatgttcctcccttcaaaggtagaagtgatccagatgcctacctggactgggaaatgaagactgagcacgtatttgcctgcaatgactacactgatgcgcagaaagtcaagctagcaacagctgaattctccgactatgcccttgtttggtggcataaataccaaagagaaatgttgagagaggaaaggcgagaggtagatacatggactgagatgaaaagggtgatgagaaaaaggtatgtgcccactagctataacagaaccatgcgacagaaactccaagggctgtcccaagggaatttaaccgtggaagaatattataaagagatggaaat

SEQ ID NO: 13591 - DNA, 395 bp, Glycine max
  unsure at all n locations
agcttcaaccaaggagagatggaccatntctagtgctagaaagaatcaatgacaatgcttacaaagttgagctgcccggtgagtataatgttagttccaccttcaatgtctctgatttatctctttttgatgcagatggagaatccgatttgaggacaaatccttctcaagagggagagaatgatgatgacatgaccaagagcaagggaaaggatccacttgaaggacttggatgacctatgacaagggctagagcaaggaaagccaaggaagctcttcaacaagtgttgtccatactatttgaatacaagcccaagtttcaaggagaaaagtccaaggttgtcagttgtatcatggcccaaatggaggaggactaaatgacaccactttgtttc

SEQ ID NO: 13592 - DNA, 294 bp, Glycine max
  unsure at all n locations
gaacctaaagacgatactgaagttcctgagcttctttgccccctttgtcgccggcaggtgaaaggttggacagtggttgaagtggcacggaagtgtctgaatgcgaagaaaagaagttgcatgcaagatgattgctcttttgtggggaattacaaggagcttatgaagcatgttaggtctaagcatccatttgcacgaccacgagaagtggacccactataagaagaaaaatggaagagatttgagtgtgagagagaacggaatgatgtgattagcacaantttatcttcaaca

SEQ ID NO: 13593 - DNA, 425 bp, Glycine max
  unsure at all n locations
agcttgaaattgatcaacgcatgctctcgagaaaatcgagtgggtcataaatttcacacagatgtccgattcggggaaataatatatcgagacgcacgaaattgaacaacggaagctctcgagaaatncgaatggtcataacatttcactcggatgttcgatccggggacataatttatcgagacgctcgaaattgaacaaccgaagctctcgacaaattagaatggtcgtaacttttcacgcgaatgttcgattcggggacataactcatctagacgctcgtaaatgaacaacggaagctctcgagaaattcgaatggtcataagttttcacacggatgtccgattcgggaacataatatatcaagacactcgatattgaacaacggaagctctcgagaaaatcgaatggtcataacgtttcac

SEQ ID NO: 13594 - DNA, 510 bp, Glycine max
  unsure at all n locations
tcgacccggatccttttgtcacctgctgcatgcgagctnntttctctatacacctacgttcctatacacgagaaanaagactnttgtctctatatacgcncgcnttgaaaagctctttctctttatactgacatggtatatatacaacctctattccttttcaaatatttctttntcctttttcaatatacactcgttgtttatataaaaacttcctttatatacacttattgctcatatacaagaatttcttttcacacattgtttatatacaaaaatttcttttcttttctttatatacagatatgacatttgttcacaacgcctctttctttntttattcttggcgttatcatgatgtttgttcattntattttaggacgacgttcctaaatgaaaactctacacggttccggaattccaacaaacactatcgacaataacgaagtaagcactaacgcaacaacccanacanaatgtatgcataaaacanatgacaatcaaaacaac

SEQ ID NO: 13595 - DNA, 363 bp, Glycine max
  unsure at all n locations
attaaagtntagatgaccatacctcaagtgctacagtatggactcatccatattctcacatttcaatgcattggtttgcccaaatggcataaatagaggaaatactttattaagagccattttgatagaaataatttggccctttcttttatgaatgatattacatttatcatcatcaaagatgactctataatatttatgaataagttgaccaacacttagaagattttgagtaagacctggcacataanatacatcatggatatatttcttgctaccattttgagtttaacagcaatggtggccttttcttcaactttntgaacatttccatcaccaagtgtaactttgaaatttattgct

SEQ ID NO: 13596 - DNA, 407 bp, Glycine max
  unsure at all n locations
agctngcagtgatccttgaagttgttctatcatcatggtttctaaatctttggtttcctcgattctcacaacaatgtgctcaaatttgggatctaacgagcgtagtatcttctccataattgttacttcttctaacttctcacaatttttttagttgatttgaaactgcaagaattcttgaaaaataatcggaaatggactccgactctttcatatgtaaggattcgaactcagctcttagagtttggagacacactntctttactttgtctcctcctttttcaaccatttcctgaacatcatgtgctccaagaagtgctttcttttttacgggccaatggtcataggtgctcccctttagaagtggaacttggaaggatgtcactccattggcttgccatactcta

SEQ ID NO: 13597 - DNA, 348 bp, Glycine max
  unsure at all n locations
agcttggatttccttntagtagggaatctatccttcctaagatggagccaaacccagtcaccctcattaagaactagctcttttcttcctctattgcctttagttgaatacacctttgtttggttctctatttggttcttaaccctctcatgcatcttctttacaaattctaacctagattccccttctttatgtataaaagaagtgtccagtgggaggggaatgaggtctaacggtgttaggggattgaacccatagacaacctcaaaaggggactgcttggtggttctatgaacccccctattgaggcaaattctacatgaggaagatactcatcccaagacttat

SEQ ID NO: 13598 - DNA, 399 bp, Glycine max
  unsure at all n locations
ttttggaatcattcgcagacatgtcttctgaacctgaaaccagcatctcaagcttgatggtgggtgagccgtccatggattgactatgctggtgtctaactctgggcctttcattaatcccaataacaacattctcggtagaagaggtgggtgcccctgacgccggtgttgaagccgatgctcccacagcattagacggctcaaccatttgaaacgtggacgttgccgacgatgaattgaacttatccatatcaaggtacatggacagcaagtcctcctcggcatcatcggagaaggaaggaccatcaccacctccaacaacaccaaggtcactgtcgaaactaatatcatccggtaaagtgagaatctncgaatgagcacgcctatgacctctatttc

SEQ ID NO: 13599 - DNA, 473 bp, Glycine max
  unsure at all n locations
atacctcggtttccactaaggagctaaagatcttaattaagaaatcttatctctntactttggttactagtatttaagccttctaaggagccttaaatatgtttgagctgctttatgataaataactgactttaattttaaatactaataaattntttcttgcattgaattttttatatatgaaacttttgttttgagtctcaatcatttagtaagtgataatgtgacactntgcaattagattttctcaatttactagtatttttgcaagtatagtgatgaggctaaatgtttattttatacaactaaaatatataataaataaacatctctaaatatataaattatattataattaaaatttgtaatntataaatgttgatatacttatnaaatatattntagatttaagataattaattatacctctgatatattattattttaatattgatgaatttttaaaaaatatg

SEQ ID NO: 13600 - DNA, 470 bp, Glycine max
  unsure at all n locations
agcttctattggattcatataccagagcagttctcttgggattntttgggtataattgtgatgctntagaaacttgataagatttgaaacttttcttcctggatcattcacacaaaaagttacctctgattttacctctgttatgggattttttttttcttgaaaagttacttctgttttgatcttcattccattatttctacaaacttcccagtatatgttccaccaatatttatctaaagtgttatgttctttttctacataatctttcatttttttaactccattactattttgatattgatcctagattgtgggtaaattgtcttattatttatcataaattcctttcattttgtcttttgttgttttcgaatattaattatttaatttgtattaataatatttcaaatagcagtcaacctgttcctgatatctttntgtagtgttctttgagttggctgctatgt

SEQ ID NO: 13601 - DNA, 472 bp, Glycine max
  unsure at all n locations
ctcgcttgcttcgaatttctctatttcttctacaaagatcctatatgcaaagcaatttcaagtttacaacttgtaatagtaatcatataattagctataaaaacaattcaataattaaaacaatctaattgtaccaatgttgatggtttatgacgataatgaacaaaatgagcccattgatctttatctatgcctatcggcacattttttatgatttcatctctagttttggttggatcgttgaattcattccataagctntgcctatttgtagcccattttcttcccatactcaatatgcaataccattttgcaccagcttcattaatcttaaaataaaatcgaggctaataaaaagataatattatcacatatcagtatgcaaataatatatatatgaaaaatagttaagataggggctctaagtggtgtagatataaaatagtatatataactaatcggcataccttta

SEQ ID NO: 13602 - DNA, 468 bp, Glycine max
  unsure at all n locations
agctntagcttcctgaaggttctcgtattcattctgttttccattgttctcttctcaaaccttttcattcctcctccccgaaacttgtcatggaattgccaccaaaaatcattgaaaaccaacctttgatcattcctctcgcaattcttaatactcgttgggactacttttcaggggaacccaaattactggttttagttcagtggaagggtctctctccagacgatactacttaggaagcctgngatcacttgaaggagacatagcaccttgaggacaaggtgttctttgaagttggaggggatgatagggttgcgcaccatcagcctcatgctaccagcactatccaccacccgttcgacatgaccactaattccaagcccaaacgaaggatcatcgctcccaaacatctaacggattacatttaacagaatcctgtagatgttgtcgagctggaaacacgttagt

SEQ ID NO: 13603 - DNA, 421 bp, Glycine max
  unsure at all n locations
cttgaagatatcttaacaatttctttgcagttgtccagtgctctattcctggattactntgatatgtctcaagcattccaaccacaaaatcaatgccaggtcttgcacacacttgtgcataggcttcctacaatagaagcatatggaatgtttctcatttgttccatttcaagctcatttttaggacattgattcaaattgaatccatcacctttcacaataggtaccatgttgggtgaacaatctttcatccgaaatatttctagaactttattaatataggccttttgagacaagctgagaatcccttgagaatgatttctatggatctctatgccaatgaaatatgttgcatcacccacatgcttcatgtcanaattcttagaaaggaattatttacatcatgtaacatcccaaaatc

SEQ ID NO: 13604 - DNA, 359 bp, Glycine max
  unsure at all n locations
gtctcacgattgtcacgtgctcatgcaacaattgttagctgtggctatacgagacatcttgccaaacaaagtcaggttcacgataactcgtctgtgctttttcttccatgctatatgtagcaaagtgattgatccagtaatgtttgatgagttggaaaatgaggccgcaattatactgtgccagttggagatgtattttccccctgctttctttgacatcatgattcacttgattgtgcatctggtcagagaaatcaaatgctgtggtcctgtttatctacgatggatgtnacccggtgagcgatacatgaagatcttaanagggtatacaaagaatctatatcgttcggaagcatcta

SEQ ID NO: 13605 - DNA, 493 bp, Glycine max
  unsure at all n locations
caagctttgacggtctataccatgctctacgatctcaggacggagaaagatctatatataggctngctaagggtagagagaggaagactagagatttggatcaagtaaagtgtgttaaggatgaagaaggcaaagtcttagtgcatgaaaaagatatcaaggaaaggtggaaggcgtatttccacaacttatttaatgatggatatggatatgactctagcagtctagacacaagagaagaggaccggaactataagtactatcgtcggattcaaaaacaggaagtaaagaaagcgttgaaaagaatgagtaatggtaaggcggtggggccagacaacatacatattgaagtgtggaaaactcttggagatagaggtcttgagtggctcaccgaactctttaacgaaattatgaggtcaaaacgcatgccggaggaatggaggagaagcacgttagtgccaatctataagaacaagggggatatacaaaattg

SEQ ID NO: 13606 - DNA, 476 bp, Glycine max
  unsure at all n locations
agcttctggtgggacatcttgactcgctttcttatctgacattcaccacagattctgtcttcttctattttcagattgggaatgcctctaacagcacctttgtcaatgattttcttcatgcctcttaagtgcagatgtccaaatctttgatgccatattctgacttcatcttctctggagaatagacatgtggaggagtaactggtttcttgaggtgtccataggtaacagttgtcctttgatctgttgcccttcattaggacttcactcttctcanttgtcaccaagcattctgactttgtgaagattacattgaatccttcatcacacagctgactgatgctgatcaagttngcagtcagtcccttcaccagcagtactttgtccagactaggaagtccatcatggactatctttcccattccagtgatctttcctttagagccatcttcaaatgtcacatagctagtggagca

SEQ ID NO: 13607 - DNA, 458 bp, Glycine max
  unsure at all n locations
agcttcccgtcaatggtattacaagttccatcaagtcattacctcatatggttntgaggcaaatgcagttgatgattgtgtataagtttagtaggagtaaatactcattcttggtgttatatgtcgatgatatactacttctaccaatgatataagcttcttacaagagactaagaaatttctaacgaaaaattttgaggtgaaagatcttggggaagtctcttttgtattaggaatcaagatactaagagatcgctctcaaggtatcctaaggttgttacaagagagttataccgataaggtcctagatagattcggcataaaatataataaaccaggagatacccgatagctaaaggagacaaatntagtctcaaacaatgccttaataatggccttgaaagaacagagatgcaaaagaatccttatgcatcagcagtaggaagtctaacatacac

SEQ ID NO: 13608 - DNA, 429 bp, Glycine max
  unsure at all n locations
tatgaactcnncttttttcaatattaatcacacttaaatctcacacaatcacaagcaatcaaccacactaaatgcaaacacaacaaaaattaaaaatgattgngttgcctcccagcaagtgcttgtttaacatcattagcttgacacatcgttctattatcctggatcaatcttggttctctcctttagaaccttctcatccaacaccttgacctgcaaacacacatcctggtccattaattctcttccttcattaaatagatcaaaactaatttgttgattntcaagactcatttccaaatttttcttccccatgtccaccacacagctagtagtggacataaatggacgtcctaaaatgacaggaatatntgcatcttcctcaatgtccattacaacaaaatcggtaggaaaaataagatgcttgac

SEQ ID NO: 13609 - DNA, 430 bp, Glycine max
  unsure at all n locations
agcttctttgagttaacttccttgagaagctagagcttagctacacacacccatctaanaactaagctcacctccttgacaaaatacatgaaaatacaaaaaaaagtccctactacaaagactactcaaaatgccctgaaatacaaggctaaaaccctatactactagaatggccaaaatacaaggcccaaaagaaggaaaaacctattctaatatttacaaagaagagtggatccaaccttgacccatgggctcaaaaatctaccctaaggctcatgagaaccctagggccttcccttggatctctggcccaatctactaggagtcttctatccaatgcccttgcggggtaagattgcatcaagaacacacattacttgtcgatgccccaccaacgaaaacatgattatgaggtgccgaaacatttata

SEQ ID NO: 13610 - DNA, 433 bp, Glycine max
  unsure at all n locations
tcagaattcaatttcgcgcgtctcaatatattacgggactctatcagacatccaagcaaaacattattgtcgtttgaattagctcagagcttcagaattcaatttcgatggtctcgatatattacgggtctcaatcagacatctgagtaaaaaagttattatcgtttgaatttgctgagagcttcaacattcaatttcgagcgtctcgatgtattacgggacttaatcagacatccgagtaaaaagttatcgtcgtttgaatntggtcagagcttcaacattcagtttagagcgtctcgatatattacgggactcaatcagacatccgagtaaaaagttattgtcgttggaaaatcctcagagcttcngtattcaatntcgagcgtcttgatatattacgggactcaatcagacatccgagtaaaaagttatt

SEQ ID NO: 13611 - DNA, 395 bp, Glycine max
cactcaagcttcttagtatcagctgatgaagatgaattcgtggctacttcatgcactcctcttatgacaatagcatcatttctggcactaaactgttgggagttggaagccatcttctcaattaaatttctggcttcagcaggggtcatgtctccaagggctccaccactggcaacatcaatcatactgatctccatgttactgagtccttcataaaaatatcggagaagaagctgctcacaaatctggtggtgaggtcaactggcacatagttctctaaatctctcccagtattcatataggctctctccactgagttgcctaatgcctgaaatatcctttctgatggtcatggtcctggaagtagggaaaatgttctctaagaatactttctc

SEQ ID NO: 13612 - DNA, 484 bp, Glycine max
  unsure at all n locations
acatggattaaaaatggtgtaaggtatgggaagctatatcgtgtagagtgttggaagcaacacatgtgagaatcctagtgtcattttattataccctctttcctttntattatctttatggcaatagtattttgaataatgtgaacttattatctttatatttatgtcctgtatttttcctttaactattcggcttatggtttattatacttctgtcaatattttttgttttatgtcaacaattatgttatgttaactaataaatgaaaataacaattaagatatagtcaaatgtgttctttgttattgaaattcaattntattagttcatgttgttctatatctatatcttaattataatgtcttataatganaataattatagtttaaagtaaattgttttataaaataatntattgaagtaaaagaaacaaatgaatantgttgttagattttaaaattatttatataananaatattcta

SEQ ID NO: 13613 - DNA, 432 bp, Glycine max
  unsure at all n locations
tcgtcttcttctctagtccagtcttcttctggtttcaatccatcagtgggctttccttctgtgtccagcatcttgggatgttcccagcctttgatgacagctttccaggttctgctatccagtgatttgaggaaggccaccatccttgctttccagtattcatagttggttccatccagaattggtggtctgttcactggtcctccttctttctccatgttcatcagaatttatctccctaggtctcactncagtgattcgagtgcctgctctgataccaattgaaattctgataccaatgccagatgtcgtacaggatgtcacgacatcacgcttcagaacatgcagattatctctgagtgtatgaacagattaaacaagtaaattacacaagagaattgtaacccgagtcggtcaacctcacctacatct

SEQ ID NO: 13614 - DNA, 451 bp, Glycine max
  unsure at all n locations
atgcttactctggatacaaccagatcaagatgcactctccagatgatattaaaacaacattcatcactgaagatgtcaacttttgctacagggtcatgccctttggcctaaaaattgcaggtgctacatactagagattgatgaaccaaattntcaagcaacaaatctgatgaanagtcgaggtctatgtcaacgacatggtcgtcaagtctcatagcatagcccaacacgtggcagacctgcaagaagtctttggaaagctctacaaatgcaacaaanaggccaatggcaaatggtgaatgtgcacanactacactgatctaagaaaggtgtgccccaaggatgcataccttctgcccagcattgacaggctagttgatagagcgatcgggttccanngtgctagcttcctggatgcttactctggatacaaccagatcatgatgcacac

SEQ ID NO: 13615 - DNA, 342 bp, Glycine max
  unsure at all n locations
atgtagcttatacacacaaagacccaggtgttggacaagtgacctcaataacttaagagggggtgaattaagtttcaaaatttcccactaacaaacttttaacctccttccaaatgataggctcagaatgcagaagaagaagcaacgatcaatttaataatgttctttaaacatgcaagacaaaattaattgcaataacataaatgagataagggaagagagaaatgaaaactcgatttatactagttcaaccacttcccgtgcctacttccagtcctcaagcaacccacttgagatttttcattatctctataaatgctntacagactntgaacacacctt

SEQ ID NO: 13616 - DNA, 491 bp, Glycine max
  unsure at all n locations
ggtacctccttcttcactacatcaagaatcaccgggtttagtcttctctgtggctgtcttactggtttagccccatcctctaaatntatccgatgcatacatgtggatgggctaataccaggaatgttcgctagggtccagcctatagccttcttgtgcttcttgagaactgataatagcttctcctcttgctcatcagcaagggaggtagatgtaattactggaaaactnttgctatcatccaagtaagcatatttntaaattgatggcagaggcttcaattctggtgtgggcggctggataatggtagaaagagatggtttctcagcctgtacctcanaaataaagtcagaggtatgtgtatttcctgaaacatggttagttctatctgactctagaaaatcaatctcaagaggtaaacatcaccagacatgtaatcaatatcaatttcagattcactctcagcatcanattcattccatatgatcaac

SEQ ID NO: 13617 - DNA, 490 bp, Glycine max
  unsure at all n locations
ggacaagtgttgttcagtgttgagagtggttttcttgacaagtgttgtccgggttgcttctgtcaagttgtctggggtggacaccctttctgatgcaagaggctccaagaggattgggctagagctgctgaagaaggtcctaaggttctcatgaactttaggatagatttttgagcccatgggccaaggttgggtccaattatctttgtacgtattagattacgatgtcactatatttggttcttgtaattagggctccataatgtaggtagggtaccctagaaatataggatntttcagcccttgtattttatggcacctagacntagttttgtattacgggtagttctgtaatttcacatgcactaagtgaatatttaatgtgtgtgttggcaaataaatttaattgaattggtagaagcccaatccaattaatatttagagggggaggtgagcattngcttactacaccccattgccacatcatata

SEQ ID NO: 13618 - DNA, 441 bp, Glycine max
  unsure at all n locations
gattgcatgatgatatgctcagaacacgtagcttgtgcaatgaagataaagcatganctccattcctgtcctttgcagatattgctacaccatctagatacaattctgtgatatctgtaaggttttgaaacattgctatgtttggctttgcaagtttcacgcagtgaggtgaggtatatgaacaagacaaatcaagagtaattaaccttctgaggtgagaaatcttttgtggaatctgcccctcgaagctagtattagacatgttcaaatacctcaaattgttcagcttgtaaagctctgaaggaatcaccgaacgaaagttattgaaagccatattaaagctctgaagatattgaaggctgaaaagaaagcttgtattaacaagtcctttgacatagagtcacgtgatatttaacattntctctaacacttagtaaaaat

SEQ ID NO: 13619 - DNA, 502 bp, Glycine max
  unsure at all n locations
tatgcaanaatcaaaatcatttcttataactnttgaataaaatacgtagatcggtagaataatacgtaatttaggatggtttttttaaaaatcaatcatattttagagaataaaacactttccaaacaatttgatggacaaagaaaagaggtgcccaaatatgttaattttgttctttagtctattttctttgtggtgtgtttgtctaagatcccttgcgcaggtaagtgattatgttgatctgtgtaattttctcaatattttttacatacttattttcttctcatctatcaaatatatttctaaagtattttaagaaaaaaatatcacaaactactttaagtatattgatttaatagtcatntttatcttggcaaatgagataaaaaaaataaaagganaaagaaattaanagaatatttaaacatganaattatattacaataattntaagataaaattataatggattaaatatatctttntatctnaaaataatata

SEQ ID NO: 13620 - DNA, 500 bp, Glycine max
  unsure at all n locations
tatctctctcattcttgatcactgtgaggcctgtcttcttatgaaccacttggactagactcacccactgactgtcagaaatggggtaaatgattcctgcttgcaagagcttggtcacctcctttttcaccacatctagaatgatggggttgagtcgccgttgtgactgcctcactggcttagctccatcctctaaaagtgtcctatgcatgcangtagatgggctaataccatgaattcctgctaaagtccatccaatggctttcttatgcttcttgagcactagcaacaacttctcctcttgctcagcagcaagggaagcagagatgatcnattggaaattttccttgtcctctccaagtatgcatacttgaggtttactggtaagggcttcaactctggtgtgggtggtggctgaacagtggaaggaactatggtaggagaagaggaggaggggtccttaccctgtacctcataaagcaagtcagaagtatatgtac

SEQ ID NO: 13621 - DNA, 500 bp, Glycine max
  unsure at all n locations
ctcgacccggatccttaagtcacctgcggcatgcaagcttgccaatccaccgtgccgtatgccttctgaatatccatntgcaccaagcatctaggagacacatntttcctaccataccctctcaccagctcctgagcaagtaatatgttatcctggatattcctaccaggaataaaagctgattgagtgtcttccaccacactatttatcacatcactcagtctgctagtcaaaatcttcgatatcaccttataaattatgctacaacatgatattggtctcatgtctttgatggtttttgcctccggggacttagggataagtgagacaatagagcagttgacaactctgtacaacttactagaattaaaaaattccaggatagcattctgcacatcattntttacaataggccaggcggcttnanaaaatgagaaganaaccatctataccaggagctgtggttcaccaatatcactagacattcanatctctttgat

SEQ ID NO: 13622 - DNA, 513 bp, Glycine max
  unsure at all n locations
tctgcagttcagacatcatanaagttcaataaattgacatgattcaattgtggatattcatagatctgcaattacagagacaatatttaacaatgcttgtattattttaaaacacaaacgcaaaattggatgaaaaccaataagaacaacttcactaatttctccataaaacccaaaaatctattttagttcatcattcagaaagggagaaaggaattatgcatacatgagaagttattaaaatgatacctttggaattcaaaatataaaaaatgatgccaggtgatgtcgccatttcactcttccctgaaaattcaaatataaaaattactttatccgaaaattagttacatattcagtagatgaactacttattaatggaatacaagtaaagaaacataaatatggatacacatagatgttactgcattcaaaattagcatgattaanataaacagcagattcttaataatatntataccaaaatcatgcataagctccagtccagcagag

SEQ ID NO: 13623 - DNA, 478 bp, Glycine max
  unsure at all n locations
atctctgagtcacctgcggcatgcaagcttgtaattcttgatccgcagataacataggtggtaaagtttgggactggaacgagtcaccaatggctttcttgaggaaagagaaataaaatgtcagatgaattttactgtgagatggaagatccaacttataagcaacaacaccaaccttgtttaacacctggaaaggaccataaaaccaaggggagagtttttcattaatccttttagccaaggatcttctcctataaggttgcatcttcaagaacacccaatcaccgactgcatattctatgtctcggtggcatttgttggcatttgctcacatgatatcttgagacttcaacaaattttctcttagagtagccaataattcattccaagagnattttagtttattgacttcttcaaggcgggaaggaatggtggatcccttgagaatgtgaggnggatcatgtccatacaaagcttt

SEQ ID NO: 13624 - DNA, 451 bp, Glycine max
agtcacctgcggcatgcagcttcacacagtttattttctcataccttgagtttgttataccaattactaagactttcctaactagatgattaagatgatgcatattaatgtgtgcatccctacgatgccacaaccaagaatcatctattttacttaccaagtaactcagctcatgaaatgatgcatgcttaacattcagcatatagatattacctattctcttgccaatgtggacaactttatcggacatggcttcacttgtaagacaacaatttttgttgaattcaattttgaagcctttgtcccaaagttgactaatgcttagaaggttgtgttttagtccatccacatataacatgttctttatttgagttgtgtgttgatttccaatatttccttctcctattatttttcctttggtattggctccagatgtgacatgtcctccatc

SEQ ID NO: 13625 - DNA, 477 bp, Glycine max
  unsure at all n locations
cgtgcattgtgtgcaatacacaattcccggtacaccacatcaaaatggtgtatcagaaaggcgtaatagaactttaatggatatggttaggagtatgttaatcaattagactttacccgtatctttgtggatgtatgccttgaaaactaccatgtatttgttgaacagggttcctagtaaggcagttccaaagacatctnttgaactgtggacaaataggatacctagtataaggcacctgtatgtttggggttgctagacagaaataaggatttataatccgcaagaaagaaaattggatgcaagaacaatcagtggatatttcattggttatccagaaaagttaaaagggtgtatgttttattgttctaatcatagtatgagaattgtcaaaactggaaatgcaagggttattgganattatgaaatcagtgggagtacagttccacgagaaatgganattaaagaaagtagagt

SEQ ID NO: 13626 - DNA, 422 bp, Glycine max
  unsure at all n locations
agcttcttagtttcagatgatgcagatggagccatcttctcaattaaatntttggcttcagcaggagtcatgtctccaagggctccaccactagcagcatctatcatacttctctccatattactgagtccttcataaaaatattggagaagaagttgttctgaaatctgatggtgggggcaactggcacatagtttcttaaatctctcccgagactcatacaggctctctccactgagttgtctaatacctgagatatccttcctgatggctgtggtcctggaagcagggaaaaatttctctaagaatactctcttaaggtcatcccagctcgtgatggaccttggagcaaggtaatacaaccagtcctttgccactccctctaatgaatgaggaanagccttcataaatatgtgatcctc

SEQ ID NO: 13627 - DNA, 489 bp, Glycine max
tgtcttggaatcaaggcttgggaattgcattggagctgccaaaggtcttcattaccttcacaaaggagtagtggtacggggaatcattcaccatgatgtgaagtcctcgaacttattgcttgatgagaaccatgttgctaaagttgctgattttggcctttggggtatcttgaacctgaatatttaaggtggcaaaagctgacagaaaaatctgatgtctatgttaaaattaatgtctcatcagatacatattatttgtataaagattaataaataaataattaataatcaaagattaaattgtattttagttaaataaaaaaagttcttaaagataactactacttgatgaaagtaatgatcttataaaaggggttaatacccactaatatgagacaatgttcccttcctgacaaacaaagtattatccctaatctagtcatcacaaacgtaaagagacagaaagaatagtcaaggaagtgaaatctt

SEQ ID NO: 13628 - DNA, 453 bp, Glycine max
agcttatgctgcaaatatttacaatagactctttcaacctcagcagcaaaatcaaccacaacagagcaattatgacctttccagcaacagagacaaccctggatggaggaatcaccctaacctcagatggtccagccctcagcaacaacaacagcagcctgctccttccttccaaaatgctgctggcccaagcagaccatacattcctccaccaatccaacaacagcaacaaccccagaaacagccaacagttgaggcccctccacaaccttccctcgaagaacttgtgaggcaaatgactatgcagaacatgcagtttcagcaagagactagagcctccattcagagtttaaccaatcagatgggacaattggctacccaattgaatcaacaacagtcccagaattctgacaagctgccttctcaagctgtccaaaatcccaaaaatgtcag

SEQ ID NO: 13629 - DNA, 509 bp, Glycine max
  unsure at all n locations
tctngaataagatatgccaatgttgtaccacagtcaactatattccctcctcggttgttagatatagaaaatacagctggattaattgggagaagttgtccattgacagcaatactctgaagattcaagttgtaatgaggcctgatcaacaagtcaaatacataaagaattgcaaattatttgacagaaaaaaaaagaagcataacaagcattttaagaacatgattatttatctaatacaaaagcttacctccccaaactatcagatcatactatatatatatatatagatagatagatagatagataggttctaatttatattaatgacttagattaattcactaaacatacatcacgtgacagatctcattctttccctgtatgcggaaaacacaacagcttggtcatttgagtgttcctcttcccattttctctganatgtgtgtgcctccctcttcttaaatggcttgttgcgctctggctctggtgtcatgcgctgcatgctc

SEQ ID NO: 13630 - DNA, 497 bp, Glycine max
  unsure at all n locations
tgtgccatagtaggccagatattgcttatggtgtgggtctggtaaatagatatatgaatgatccgaggacttctcatatggctacagcaaagagaattttgagatatgtgaagggcacacttgattatggtttgttattctccaaagcaaatcataatcaaggaataaggttaattggcttttctgatgcagattggagtggtgatgtagaggacaacaaaagcaccactggatatgtcttcaaattacttgatccacaatctgttggagttctaagaagcaagaagatgttggactttcaacttgtgagtcagagtacatggctgctgcctcagcagcttgtcaatcagcctggttggagtccctctttgcagaatngaagattcagcttgattcagttgttcaacttaacatggacaacaagtctgctatatgtcttgccaacaacccaattccacatggaagaacaaagcatattgtgacaaagtaccactatc

SEQ ID NO: 13631 - DNA, 437 bp, Glycine max
  unsure at all n locations
tcttgagaatacttccatgagaagctagagcttagctacacacacccctctcataactaagctcatctccttgagaagcttccttaagaagattcctaaagaagctagagcttagctacacacacatctataatagctaagctcacctccttgagatgagaagctagagcttagctacacaccccctataatagctaagctcacccccatgacaaaatgcatganaatacaaaaaattccctactacaaagactactcaaaatacctcgaaatacaaggcataaaccctatactactagaatggccaaaatacaaggcccaaacgaaggagaaacctattctaatatttataaagataagcgggctcatacttagcccatgggctcgaaatctaccctaaggctcatgagaacccgagggccttcgctgggatctct

SEQ ID NO: 13632 - DNA, 478 bp, Glycine max
  unsure at all n locations
agcttgttcttgactcatcttctccttgaagtgtcgtctccaatcatctttcctccttctccattccgcttccattgatcttcaagaagcaaaggactccattgatgaaaaagatccaaggcctacaagctccacatggagctacatcaattaggatcttcatcaagctttctccttctaaatttatttggcctactacgaccctttttgtattttggtggttgaatctcatcaaatctataactggccacatattcataccattaattgatgtcaccttacgtccataacaaacaccatatgtatcccttgaatattaattattcacataatcgacaaccttaanaaaatttaattgtattgcaaccactacatgtgtgcaaggtatgccaaccaatctccanaagttacatgaacaactcnntgttgttataccaataataaattnttcaatagaataaatatatgacttcaaaat

SEQ ID NO: 13633 - DNA, 494 bp, Glycine max
cggttcatatcattattagattacatattattctcttatttatgattagatactaaatagtgatttagtccttattactctttattaaattgagggcgagccctggtgcagcggtaaagttgtgccttggtgacttgttggtcatgggttcgaatccggaaacagcctctttgcatatatgcaagggtaaggctgcgtacaacatccctcccccataccttcgcatagcgaagagcctctgggcaatggggtacagaagttttattttttactctttatataattgatcctctataatcaatattaatcctatttgttcattataaataaagacttagtgtggtcatccaacacacacacaacactacagtaaaatacttgtatatattaacatctttgagagaaatatcatatcatgtacacttaacaataacagcaatataatgagttgcctgatatacatatcggaatagtctttattttcgctatgtcac

SEQ ID NO: 13634 - DNA, 152 bp, Glycine max
tatgaccatatcaatcgctggagagtttccgacgtctaattatgagcgtagccatatatgatacccctggagaggacctccgagcgaaaagatatgaccatagcaatcgctggagagcttccggcgttcaattacgagcgtctctatatatg

SEQ ID NO: 13635 - DNA, 436 bp, Glycine max
  unsure at all n locations
agctataatatatcgaanatgaacaacggaagctctcgtatattcaaatggtcataactnttcacactgaggtccgattcaggtttataatgtatcgatacactcgaaattaaacatcggaaactctctagaaattcaaatggccataacttttcacacggatttccgattcgggcgcataatatgtcgagaggctcgatattgacaacggaagctcttgagaaatcaaatggcataactntcacacggatgtccgattcgggcaaatcacatctcgagacgctcaaaactgaacaacggaagctctcgagaaattcaaacggtcataacttttcacacggatgtccgattcaggcttataatatatcgatacgctcgaaattgaacatcggaaactctcgagaaattcaattggtcataacttttcacacggatg

SEQ ID NO: 13636 - DNA, 471 bp, Glycine max
  unsure at all n locations
cgttattaatatagttaataaaaataataactaacatgagctacgcctctgttttactaaaggtatactctgatataattaattnttccattgtttctagtctaggaattaggatataaacatggttttaaaaaaagtttgtggtcatcaatgtgtgtagttacactctaagtttgtaaggagaggatatatatttgattttaaaagaatatattatggtgaagataattggagatccaactgaggaaccaaagaatnttaattactgtgttaacgatggtgcaaaacatatatggtgattacaatttaaaaccatttgaattaaaagataattaaccatgtatgaaacgtaaaataaattaagagaaatattaatttaatttttgtgtgaatatgttagctagagttggaatttcaatcgtgttgaagtgggttctgcatgattggaacgatgaactctctgtgaagata

SEQ ID NO: 13637 - DNA, 491 bp, Glycine max
  unsure at all n locations
tctcacgcccttgacatttattggaggaggaagtttctcaatatcatcaatcttagccttgtccccctcaatccccctcactaaaattttatgtcccaacactatgccttcttagaccataaagtgacatttttcccaattaagcaccagattagactcttcacatctctgtaatactctttctaaattccatagacaacaatcaaaagatgagccaaaaacaaagaaatcatccatgaaaacttcgatacatttctccaccatatcagagaaaattgccatcatgcacctctgaaatgtagttgaagcattacaaagatcaaaaggcatacacctataagcgaacacaccaaacgggcaagtgaaagttgtcttctcctgatccttaggatccactatgacctgattataatcagagtatccatccagaanacagtaaaatgctnggccctgcagtctttcaagcatctggtccatgaagggaagtggat

SEQ ID NO: 13638 - DNA, 389 bp, Glycine max
tggtcataactgttcgcacggaggtcttattcatgcgcataatatatcgagacgcaagatattgaacaacggaagctctcgagaaattcaaatgctcataacttttaacacggaagtccgattcaggcgtataatatatcgagactcacgaaattgaacaacggatgctctcgagaaattcaaatgggtataacctttcactccgatgtcagattcatgtgcataatatatcgagactgctcaaaatttaacaatggaagctatcgagcacatctaatggtcataacttttcacttggaggtccgattctggcgcataatatatctaaacgcacaataattaactacggaagctatcgagaaattcaaatggtcataacgtttcacttg

SEQ ID NO: 13639 - DNA, 490 bp, Glycine max
  unsure at all n locations
ntccattctctnggaagttcatcattgggattgacttcttctggaggatcttcattgtttcctttatcatttcctttggaatcttgttcatgaatattcatatgttctaaagaatctgcaatatcatctagcatattctttcttgacaagatagcattagattcatcaaaggtaacatgaatggattcctcgatattcatagttcttttattatatatcctatatgctntgctntgtaatgaatatccaagaaaaataccttcatcagattttgcatcgaattttcctagattatctttaccattattaagcacaaagcatttgcaaccaaaaacatgtagatgagaaatatttggttgtctaccattatataactcatatggngttttctttaaaatgggtcttattaaggccctattcatgatgtaacatgcagtatgtcgcttcagcccanaaatactntggaagagaagtatcatttaataaagtt

SEQ ID NO: 13640 - DNA, 488 bp, Glycine max
  unsure at all n locations
agctaagtttattcttcttggtgatgcacctttcgatccccaccaaattcaattcaacatcctctgaatcacatcctttagagttgctggaataaagtagatactcatggtgtatgaaggcatttgctcttctccaagtcactatttttcttaaaaaacagaccttttccaggatttctctttaaatacctaaaaatttggtagaatgcctcaatgtgtttttcataaggagagtgcataaactgatgtacaacactcactgaaaaaacaatgtgttcgggtataagacaagtaaatcaatttgccaactaacctttggtatcttccaacatcaataggaaccacttccttttcccacaatttcccattgggatcgatggnggtatctgctggtctacaaccgctcattccagtttcttccaagaggtctagaatatccttctgtanggaaacaacaattcctctttttgagcanacaaactccattc

SEQ ID NO: 13641 - DNA, 492 bp, Glycine max
  unsure at all n locations
nttcctttgngttctctgctagagtttccaagtgttagagagtagaagaaggaattgaagccttaatttcactgtgtccctgcaaggggcatttatctctctttactggcattatttcgcaaatcccaacagtgggaatgtgtaaaaataagttttaaagggggtgtccaaatttcaggacgatccaatggttaataagtccaggattgtagttttactgggataggtttgggtgtatgtgggaaaaagagagggttttgggagaggaagaatggaggacgaatttgggagaaagagagagcgtagaaacatatcgtaaatgtaaaagctaacttaatatgtctctatttatagttagggtactctaagcctattatttactctatttttctttattntattaatttataaaaatgaactctatntttctatttcattaaataaataaccaattaaaaacccctttattgtctanaacatcactgtactcta

SEQ ID NO: 13642 - DNA, 397 bp, Glycine max
  unsure at all n locations
nntgatttccttgttccggagacctttcatttctcatgtgcacccaaacccaatctacgggttcgaagacaaccttctttctccctttgttggcttgtttagcatagcttttatttttcctctcaatttgatctttgactctctcatgaagcttcttcacatagtccgcctttgcttgaccttctttatgcttaaaaacagaaacattatgcataggcaaaagatcaagaggagttagtgggttaaaaccataaacaacttcaaaaggagaacaattagtggtgctatgaacaactntattgtaagcaaattcaacatggggtaaacaagcttcccaagttttaagttcttcctcaaaactgtcctaagcaaagttcccaaagtcctattaacaact

SEQ ID NO: 13643 - DNA, 502 bp, Glycine max
  unsure at all n locations
tgtaatcgattacacaaatactgtaatcgattaccagagcagattntcttataatattctcatcagtcacatctttttatttggttcttgaatggccatcaaaggattatatatatgtgacttgagacacgaatttgctaagagtttttcagaacaaaaaggtcttatcctcttaaaaagcaaaattgtttcatcctcttaaaaattccttggccaaaacacttgtgattcaataaggaattatttgagtgctcaaattgttcaatctatctctttcaagagagattacttcttctttattcagaanaaagaattaagagaccgagggtctcttgttgtaaagaaatctaaacacaaaggaaggattgtccttgtgtggttcagatcttgtaataggctnttacaagatagtggaactctcaagcgggttgcttgtggactggacgtangcacaagggtgtgactgaaccagtataaatctgagtntgcattctctcttccc

SEQ ID NO: 13644 - DNA, 454 bp, Glycine max
  unsure at all n locations
cttggagtttccaagtgccaattcgtcttcttctttagtccagtcttcttctggcttctatccatcagtgggctttccttctgtgtccagcatcttgggatgttcccagcctttgatgacagctttccaggttctgctatccagtgatttgaggaaggccaccatccttgctttccagtattcatagttggttccatccagaattggtggtctgttcactggtcctccttctttctccatgttcatcagaatntatctccctaggtctcactcagtgatttcgagtgcctgctctgataccaattgaaattctgataccaatgccagatgtcgtacaggatgtcacgacatcacgcttcagaacatgcagattatctctgagtgtatgaacagattaaacaagtaaataacacaagagaattgtaacccagttcggtgcaacctcacctacatc

SEQ ID NO: 13645 - DNA, 391 bp, Glycine max
  unsure at all n locations
gtctgattgagtcctgtaatatatcgacacgctcganattgaatgttgaagctctgagcaaattcaaacgacaataaatttttattcggatgtctgatattgtcccgtaatataacgagacgctcgaagttgaatgctgaagctctgagcaaatacaaacgacaataacattttactcggatgtcggattgagtcccgtaatatatcgacacgctcgaaattgaatgttgaagctctgagcanattcaaacgacaataactttttactcggatgtctgattgagtcccgtaacatatcgagacgctcgaagatgaatgttgaagctctcagcacaatcaaacgacaataactatntactcggatgtctgattgagtcccgtcatatatcga

SEQ ID NO: 13646 - DNA, 367 bp, Glycine max
atgttcttaagcaaaagctatctattgccctcatacttgcgttgccaaactttcaaaaatcttttgaaattgagtgtgatgcttcaaatgttgggattggggctgtgttgatgcaagaaggtcatccaatttcttattttagtgaaaagttaagtggtcctacccttaactattcaacttatgataaggagttgtatgtcttagtacaggctttgaaaacatggcaacactacctttatcccaaggaaattgtcattcatagtgaccatgagtccctcaaacatatcaaggggcaaggcaagcttaacaaaaggcatgcgaagtgggtggaattcctagagcaattcccttatgttatcaaacataa

SEQ ID NO: 13647 - DNA, 495 bp, Glycine max
  unsure at all n locations
tgtgcctcttcacattnggaatatgaatgcaacatatagatccatagacccataggtgctntgctgatggcttcttcccgttccaagcttcaattggagtcttgtcttttacagacttagttagacatctgttgagtatgtaaacagcagtgtagactacttcagcctagaatgtgttaggtagtcccttctccttgagcatcaatctagccatttccgtaactgtgcgattctttctctcagacacttcattntgttgagaagaatatgcggcagtaagttgtcgctcaatgccttcatcctcaaaaaatctttcaaactcgcgagaggtgtactctntgtcgcgatcacttcttagtacttttatccgttgtccacttcgatttcagcaagggccttgaacttcttgaatactccagagacttctgattattcttttagaaaatatacccatgtcattctagagaattcatcaatgaagagtatgaagtacct

SEQ ID NO: 13648 - DNA, 507 bp, Glycine max
  unsure at all n locations
tctaagggagtgggtatcctatttactaataacagtttataacagttcatccaggctactattctatccactctntgcagtgtcttcatggaccaaagtggctgaaagctgaagttcttttttggttagtataggcttaatttttcagtgcaatctgtcttagtcttactgcttactctgattatcattattctatctaatttatcagcaacataaatactggcaaacatgaagaatgaatttctctgtatacctgtatggtgggcagttactgtatccaaaagtgtgttggtagtataactattggattgcagtcttattcgtcttggctcaacaacatccaccgagctcttagaccaaaatgcanaggtagatgaatcgaatntctgcataattcaattagaanatgttatattgagattgactacaaattaatttcaaaatttcacanaggaaaacaacaagcttacatcacatcttgttatgttctcaattggatatattctc

SEQ ID NO: 13649 - DNA, 483 bp, Glycine max
  unsure at all n locations
gcttgtacctcatcactttcttccgaagctntaacctcattgtctctcacagtctttagatttgggagccaatccaatccttgtgtccgaactctcagccacttatgataaccgccgatgatcccattactgcttcccctaagctctctgtcctttcttcacaccgcatcccatgccttgcgaactccttggagtacccttgcgttgtggtcactgaaaccccgtgcgatgaaaggcgtgatgctttcatctgatggcactcctctcatggggtagccaagctgtcttatggtgaggacgggattatatgtgtgccatctctagatgatttgaaagttcagatnttggaggaagcacataaaagtcgtcttagtttccatccaggaatgactaagatgtaccaagatttgaagaagaagttttggtggcatggcatgaagaaagatgtagccgaatatgtagcaagatgttcgacatgtcaaa

SEQ ID NO: 13650 - DNA, 439 bp, Glycine max
  unsure at all n locations
tgtaatcgattacacacatacagtaatcgattaccagagcacattttcaaaaaatattctcaacagtcacatctttttatgtggttcttgaatggctatcaaaggcctatatatatatgtgacttgagacacgaatttaagaagagtttttggagaacaaaaaggtcttatcctattaaaaagcaaatcgtgttatcctcttacaaattccttggccaaattacttgtgattcaataaggaattatttgagtgctcaaattgttcagtctatctctttcaagagagatttcttcttttcttcttcttcattctgaaaagggattaagagaccgagggtctcctgttgtgaaagaattctaaacacaaaggaagggttgtccttgtgtgtntagaacttgtaaaaggaatntacaagatagtggaactctcaagcgggtt

SEQ ID NO: 13651 - DNA, 328 bp, Glycine max
  unsure at all n locations
agaatcagacatccgtgtgaagagatatgtgcattagaatatctcaagagctttcgcaggacaatttccagcttctcgacatattatgcgcccgaatcggacatccgtgtgagaagctatgaccatttgaatatctcgagtgctttcgatgtagaatttccagtgtgtcgatatattctaaacctgaatcggacctccgtgtgaaaagttatgactatntgcatatcaggagaggtatcgatgtagaatttcgagcgtatcgatatattataagcctcaatcggacatccgtgtgagaagttatgaccattagaatttgtcaagagct

SEQ ID NO: 13652 - DNA, 490 bp, Glycine max
  unsure at all n locations
cagactcanaacagcanaactcaagccataattcgaatgaaaatagatccatgacaagatagggtgctataacctttagcaccgactaactaccataaagatcaagaaagaaagaccctcttagcgcaaccttctagcttccctttcagactcgagtagggtgagaatgtctccttctctcactggtcctttaacattcctcatgatgtgacggttctgatcatccagaaacttcactctaacctgggtcacctgtcctctggatccagtacgacccattactttgacaacaagtgcgtgcttcacctgagactccatcctgctcaaacacaatcaaaccgttatgagatgaaagtggaanacaaatgtgtttaatgaatcaatgacagataaatcaggaataacatcttccaaatgcaaaaggactcaaaccttaaatcattagctcttcaactttcaattntcacagaatcatcctaacagcgaatga

SEQ ID NO: 13653 - DNA, 497 bp, Glycine max
  unsure at all n locations
ctaagcttattctacacctganaagaggatgagatggttgcacaaaagagatagctccttgatcatgagggagctaacaaaaattttcatgcagatggaccttcttctactagctctgacttgcagtagcctcttatccctcttccatttccacctagagcaattccaaacaaaaaaatggaagaagtggaaaacgagatcttgaagaccttcaggaaagtagaggtgaacatacctctgctagataccatcaagcagattccaagatatgccaagtttctaaaggagttgtgcacccacaaaaggaagctcaaggtcaatgaaaggattagcatgggtagaaatgtgtcagcattgataggtaaatctgttcctcacattcttgagaaatgttaggacccaggaactttcagtataccttgtattattgggaataataaatttgagaatgccatgctagatctangagcatcaattagtgtcatgcctctgtccat

SEQ ID NO: 13654 - DNA, 475 bp, Glycine max
  unsure at all n locations
cctatntctcatacatgcatgacagtcacgttgtattcaactattgcaacaccaccggtgatgtcatacacatatgtcgtaagcacagcagaaccccttgcatatttgaagatcccagtacccccaacaattggcatttctctaacttttataaatgtagggtttctgccaagaatgctgagggtgctgccattgtaaatgcccaaagtgaagagaaaatttgtcaccatgagcaacccaggctcatgttgtgaagccaaagcgtatattccctgagatcttcccacaagctntgaagttggacttggtccttcagttagagggtcatccatcatgtaagtagccccaaaaccatgaatggaccccttangaggcaaaacagttttcatagcagttgggtgttcccccgttatgttgttatggaaatagaagtggagttgggtgaagttttctttcacgggttctgtggatggat

SEQ ID NO: 13655 - DNA, 405 bp, Glycine max
  unsure at all n locations
ataactnnttactcgatgtctgattgagtcccgtaatatatcgagacgctcgaactggaataccgaagctctgagataattcaaacgacaataactttttactcggatgtctgattgagtcccgtaatatatcgaaacgctcgatattgaatggtgaagctttgagcaacttcaaactacaataactttttactcggatgtctgattcagtcccgtaatatatcgaaacgctcgatattgaatagtcgaagcttgagcaaattcaaacgacaataactttntactcggatgtctgattgagtcccgtaatatatcgagacgctcgaactggaataccgaagctctgagataattcaaacgacaantaacttttactctgatgtctgattgagtccgaatatatcg

SEQ ID NO: 13656 - DNA, 392 bp, Glycine max
gcttcggtcttaatttcgagcgtctcgacatattttatactcaatcagacatctgagaaaacgtattgtcgttgaatttctcagagattcggcataccatttcgagcgtgttgatatattacgggactcaatcatacatccgagtaaaaaagtgatggtcgtttgaatctgttcagagcttcggtattcaatttcgaccgactcgatatattacgggactgaatcagacatccgaccaaaaagtttttgtcgtttgaatatgctcacagcttcggtattccatttcgagcgtcttgatatatcaccggactcaatcagacatccgagttaaaagttattggcgtttgaatttgctcaaagacctcacattcaatatcgagcgcttcgatata

SEQ ID NO: 13657 - DNA, 399 bp, Glycine max
  unsure at all n locations
aggacnnctttgagggccaccaacaattttcacctcacacctccattggaagaggtgggtttgggttggtttacaagggcattctacctgatggctcaatggttgcagtgaaaaggcttgaagaatcatattctcaaggagatgctttgttctaaagcgaggtggagaatgttagcaacttgaagcaccgtaatctggtgccattaaaagggtgttgtgtggttgatgaggaggatgataaccacaattttgagtactgaaggtatctagttcatgaatatatgccaaatggtagccttgaagaccatctcttttcaaccatattagacaaccaatatacaaagaagtcccttacttggactcaaaagaaaagcataatcttggatgaggcatatgctt

SEQ ID NO: 13658 - DNA, 372 bp, Glycine max
  unsure at all n locations
agtgtccgagcgccaattcgtcttgttctatactccagtcttcttctggcttcaattcttcagggggctcttcttctgtggccaacatcttgggatgttcccagcctttgatgacagctctgcatgctctgctatccagtgatctgacgaaggccaccattcttgctntaccatattcatagttgcttccatcgacaataggaggtctgttcactggtccgccttctttctccatgttcatcataatctatctgcctagatctcactctgtgattacgagagcaggctttgatccaatagagattctgataccatgggacagatgtcgcacacgatgtcacgacatcacgcttctaacatgcagatatatgt

SEQ ID NO: 13659 - DNA, 423 bp, Glycine max
  unsure at all n locations
tgcaagcttcattggagcttgtaggcctaagatctttcatancattggattcctttacttcttggaagataaatgtcagcggaatggagaccgcaccacagagaggagacgccacttnaaggagaagatgagtctagaagaagctcaccaccataggaggccatggataagatcttggaggaagaaggatatgaatgaagggagagggagagaacagcacgatattttgtgctcaaaaggagctctgacatctgaagttaatattcgaatgatcaaagttgnaaaaaatgcacacacatgacctctatttatagcctaactgtcacacaaaattggagggaaattcaaacttcacttgaatctgatattgaatttgtggagcctaactctggagccaaaatttctctaattatgattagtgaa

SEQ ID NO: 13660 - DNA, 398 bp, Glycine max
agcttgcaattgaacaacggaagctctcgaaaattcatatggtcataacttttaactcggaggtctgattgaggcgcattatatatccacacgctcgaaattgaacaatgggagctcttgagcaattccaatggtcataacttttcactcggaggtccaattcaggcgcataatatatcgagacgctcgaaattgaacaatggaagctcttgagcaattcaaatggtcataacttttcactcggatgtccgattcaggcacataatatatcaggacgctcgaaattgaacaacggaagctctcgagaaattcaaatggtcataacttttcactcggaggtccgattgaggcgcattatattttcagacgcttgaaattgaacaaccgaagctcttgag

SEQ ID NO: 13661 - DNA, 493 bp, Glycine max
  unsure at all n locations
taacacgtatgtgatgcaatccaaccccgcaagggcatnggatagataactcctagtagaatgcgccagagatgtaagagaaggccctanggttcttatgagccttanggtagatttcggacccatgggctaagtacgagcccacttatctttgtaaatattagattaaggtttcattatttttgggccttgtatttagggctccataatgtaggtagggtaccctagaaatatangatttttcagcccttgtattttagggcacctagactacgttttgtattaggggtagttttgtaatttcacatgcactaagtggatatttgatgtgtgtggctggaaataaatttaattgaattggtagaagcccaatccaattaatatttagagggggaggtgagcatttgcttactacaccccattgccatatcatatagtcacactttgtgcatgtncttcatngctttcatgcctcatgacacctaagcacact

SEQ ID NO: 13662 - DNA, 425 bp, Glycine max
  unsure at all n locations
tgtgtagtccaccatctnttcatagtatattactggtaatgtgtctactatcattatcantttttcttcgtcattgaggtgccacttgagttgccaggtctctccacctttgggcgtattctttgaaagatctgtgcccctttttgcacatgttctattgttgcatcctatccggaaccatatcaaaattgtactgatagtgcctaatgaaggcaaccattangtccttccaagagtggactcgagaaggttccaggttagtgtaccaggtaacagctaccccagtaagattttcttagaaggaatgtatcangagttcctcatcttttgcgcatgcccccatctttcgctaatacatctttagatggttcgttgggcaagtagtccccttgtacttgtcaaagtccatcaccttgaacttgata

SEQ ID NO: 13663 - DNA, 479 bp, Glycine max
  unsure at all n locations
tgcaagcttcacatagctcccactctcgtactcctttttacaccctattcattcggatagagagtgaataatccaaagaanatcagcatctatcatgatgtgcacaaatttctgcaacttcatttgcattactttcttgcaaaatgtgtggaaatgctattatttttttggcatcttaattctgatttccttattgatttggctaataggtcattttaatacgttgatattccagagatgcatgttagtagtaacttttcccaaaaaattataattattagagctatatacaaatgaagttcacacctgaagattaagctcattgtatagggcctttactttagcaacattttctggatctggcttaccatagttctcctgcaaaccacaaaaaaatagtgacttattgcagtctaatcatggcagaaaataaggaaagaaatangaaataataagacgctcacttacttgtagaaatt

SEQ ID NO: 13664 - DNA, 429 bp, Glycine max
  unsure at all n locations
agtaganagagganacagacatggaaccttgtttttgtgtgttcttttcatgcttaagttgaaaaattaaaggaccatttcgttgctcaatacgttcttgaagatcatcccagattgctttggcagaagaacaatgtaagatactgacttgcatttctttggataaagaattaatgagccaggaagaaacgatactatcattgcgatgccacaaagcatgagtggagtgacccaaagcaggtttaggaattgaaccatcaacaaacccatatttgttcttcccatgaagagccatgcacattgctttcttccaagaattgtagttatcaccggtaagaggatgagaaactaaggcaatgccaggatggtcggaagaatgaagaatgaaggggttagaatcatcaatggcagccatggtcatgagataaa

SEQ ID NO: 13665 - DNA, 436 bp, Glycine max
  unsure at all n locations
gaaaagctagtaaatacttgtatattattcatttgcaacatgttggtataaaaaagtaacaacgataataaaattaattaaggcgtacccaacaagctttctcttgctttgaaaagtcattaatcgtaatgaaaaataacaattaaacaacaattaataaaagagaagtcaagcttattgaaaagctagtaaatacttggaaaatatccatntgcaacatgttggagtaaaaaagtaccaattatctcactaatgaaacttatatataaaaaacattaataaattaatcaacatgcacctttcaataagcgataataaattaatcaaagcgtataactagagacatgttgacagtaaatattaatcttcatctattattgatcttatttataaagaaactgtaatgaataatactatcatgttagaagtcgggtat

SEQ ID NO: 13666 - DNA, 463 bp, Glycine max
  unsure at all n locations
gtactctagagtgctaagctgctaattaatattgttcattcaactggttcacaatgaggttaatatcagtgttggaggaacccgcgatgattatatcatctacataaatgagattaagcaggcagcaaccatgtttgttgaatacgagaagagagggatcacacttggattgttgaaaaccaaaggagatgagagtatttgtcaaactctcataccaagcccttggggcttgttgtaaaccatatattgccttgtgaagtttgcatacaagagtggattcaccctgaataaagccttgaggtttttgcatgtagacatcttcatggagttgcccattaagaaaggcattgttgacatcaagttgaataaggcgccatttggaagtaagagcaatggtgaggacaattctcagtgtgattggtttcaccactggagagtangtgtcactgtaatcttgaccata

SEQ ID NO: 13667 - DNA, 422 bp, Glycine max
  unsure at all n locations
agcttgngatgaaacagatgtgattcatcaaaaatttcttctctgctgagtagaactttcttttcggatgatgaccagatcctatagcctctcaccccatcaccataacccatgaacagaccctttcttgatctaggtaccaactttccttcattgacatgataataagcattgcagccaaatactcttaggtttgagtagtttgttgttttgccattccaaatttcaataggagttttaagtcctatagcagtagagggtgttctattgattagaaaacaagttgtattgatagcttcttcccaaaaacttctgctgagaccagcattatacaatagacatctttgtctttccagaagtgttttgttcattcttttagcaactccacttttctgaggagtgttactaacagtaagctgtct

SEQ ID NO: 13668 - DNA, 475 bp, Glycine max
  unsure at all n locations
gagnngcaagagacatgttagagagatctcttgantttgcatttgcaannacctnnggntggctttccctgcttaaacatcttagaactttgcccatgaaatccttattaggaaatatctttcctaatgatgcaagatgaataactatatgtgtaaatctcttttgcatatcttgtatgatctcattttgattcattctgaaaagttcatattcatgtgttagggtgtttattctagatctcttaacatctgttgttccttcataggttacttgtaatgtatcccatatttcttttgcattcttacaatttgagactctaaagtattcatccattcctaatgcagaggtaattatatttttagcctttaagttatattgtaccctttntgtttccccttcatcccactgtttcctaggtttttctatagttgcatttcctactaccattgtggggatgtaaggaccggtttcaat

SEQ ID NO: 13669 - DNA, 449 bp, Glycine max
agcttaacatgttgtgcttggctactctcaatgatttcatgttgatttctaaaggaaaaactacttcatgctcgtatgtcatccgaaatacggtacaaccagttgctttggtgggcatatttcgacaagcccataatgcttcttgtcatattttcagatgatcttataaattcttcttaattatatcaatcaagatcttattggtagcttcaactttctcatttgcttgtttataataatgtgttgaatgtacaagcttgatgtcgaattgttgtacgaacaaattcaccttgtctccagtaatcataattccttggtcagatgtgatagactcacgtatgcggagcaataaaataatggtatgtttaatgaatctaaaaacaacttcttgagtcgcaataaccaatggcttagcttccacccatcttgtaaaataattagtggatact

SEQ ID NO: 13670 - DNA, 444 bp, Glycine max
  unsure at all n locations
atgtctggatatactgtcttctttccatgctttagnngtangaagctngngnnnnnctcacagataggacatgcatgatgccttttcgcactgcctccacttaaatntccatattctagaaaatcattaatagtacaaaacaccattgtgcgtaacctgaacgtctgctgcacatttgcatcccacgcatctaccccttcttcccacaattgtttcaagtcttcgattaacggcgtaagatacacatcaatatcattccctggctgccttggatccgcgatcgtcatacacaggataatgtatttacgcanaatgcacaaccatgtgggaaatgtgaaatcatcagtaaataggcacgaactgtggttgctgttaagcaccataagataatctcatagaacaagagcagccttagttcttgatcatccaaacttaatacaacat

SEQ ID NO: 13671 - DNA, 318 bp, Glycine max
agcttctcactcggatgtccgattccggagcataatatatctagacgctcgaaattgagcaacggaagctcttgagaaattcaaatggtcataactttccacatggatgtctgattaagacgcataatatatcaagatgttcgaaattgaacaacgaaagctctcgagaaattcaaatagtcataactcttcactcggaggaccgattcatgcgcataatatatcacgacggtcgatatagaacaacgaaagttcttgatagattcaaatggtcatatcttttaaccctgataacctatttagagacattacatatag

SEQ ID NO: 13672 - DNA, 384 bp, Glycine max
  unsure at all n locations
atgtcagcttcccgccagaactctatgggcngattgtgtgatttattatacatcaanacaagccccttaaaaaaagtgacttgacaaaaacacgccctaaaacatgagaaaaggaacacaatcacggttggggattcataggcaagttaccagcctttcttgttctgaagatcgaccagcgaaacagcttttctttattcttttaattgcaacatgcgatcctctccattttccatggtacacagtcccaaacgtaccagaacgcagctctggcaactcttctagatattcattctttatgaactgccatgtgcactttanatatatgtgataaattaaatgtcactaatcttatgaacgataatctataatgtgatttgagaa

SEQ ID NO: 13673 - DNA, 345 bp, Glycine max
  unsure at all n locations
tgttcatcatcggaatctcgttagacttcttggntgttgcgcatatgccccgagagaatcctagnttatgaatatatggcaaatagcagccttgacacattcttatttggtaactcacttcaaccatcaatggaataatatgttgaatttttattgccttttcttctcttctccacaatcttacgtatatataaaaacatgggaagcacgttccaaaaaaggttccctcaattggaaacaacggtatgatatatatttgggcacagcaaggggactagcatatctacatgaggaagtccatgtgtccatcattcataaagatataaagaccggtaatatccttct

SEQ ID NO: 13674 - DNA, 411 bp, Glycine max
  unsure at all n locations
agcttcttagtctcggctgatgaagatgaattcgtggctacttcatgcactcccctaatgacaatagcatcacttctggcactaaattgctgggagtttgaagccatcttctcaattaaacttctagcttcagcaggggtcatgtctacaagggctccaccactagcagcatctatcatacttctctccatgttactgagtccttcataaaaatattggaggagaagctgctcagaaatctggtggtgaggacaactggcacatagtttcttaaatctttcccagtattcatataagctctctccactgagttgcctaattcctgaaatatctttcctgatggccatggtcctggaagcaagggaaattntttctaagaatactctcttgaggtcatcccaacttatgata

SEQ ID NO: 13675 - DNA, 403 bp, Glycine max
  unsure at all n locations
ataccttntngtatgagtatgctttagcaactattcttgttttgttacttacaactntaccagtttcatccagtttggtgggaaagacccacttcgctcctacaactttttttcctttnggcaattcaactaacttccaaacatcattcttctgaaactgatcaagntctgtttgcattgctgtaacccatttgtcatcttccattgcatcaacaatgtggttaggtgccattttagagaccagcgcaggaagcgcttgtgttttgagtgatgatcttgtttgaacatgatctactagatcaccaatgatttgactatctggttgatttattctcatgatgcatccagtgggttactcgaccgtcttctgaactatctgttgagaggacactttctatcctgg

SEQ ID NO: 13676 - DNA, 476 bp, Glycine max
  unsure at all n locations
tgtctctgatcaaacacattgtgctgtacagaaagtttctttataatangaattctccccanaaatattanggttgtcaagactatgaagtcaacttcattcactntgttgccagagtcactggtatcttccattcacacagatgttcaaaaaggattggttccttgttatctttgtgccactgtgggaacaacttcaaccactgcaattgatccattangaccactgtgcaaggtggcaaaagaatatggcatgtgggtccatgttgatgctgcttatgctggaagtgcatgcatttgtcctgagttcagacacttgattgatggagttgagggtgcaaactctntcagtctcaatgctcacaagtggtttctcactaacttagaattgtgctgtctttgggtgaaggatccagcttctgtgattaagtccctatcaacaaattcagtgtacttagaaaacagtgcttctgattc

SEQ ID NO: 13677 - DNA, 403 bp, Glycine max
  unsure at all n locations
gctntgaatgcactattcaatggagttgacttgatttcttcagactgatcaacacttgcacagtgtccaaagatgcatgggagatcctgaaaatcactcatgaaggaacctccaaagtgaatatttccagattgcaactcttggctacaaaattcgaaaatctgaagatgaaggaggaagagtgtgttcatgacttccacatgaacattcttgaaattgccaatgcctgcactgccttgggagagaggataacagatgaaaagctggtgagaaagatcctcagatccttgcctaagagatttgacatgaaagtcactgcaatagaggaggcccaagacatttgcaacatgagagtatatgaactcattggttctcttcacacctttgagctatgactctcgga

SEQ ID NO: 13678 - DNA, 382 bp, Glycine max
  unsure at all n locations
agcttatgctgcanacatatacaatagacctcctctacctcaatagcaaaatgaaccacaacagaacaattatgacctctctagcaacagatagaatcccggatggaggaatcaccctaatctcagatggtctagtcctcaacaacaacaacaacaacctgctccttccttccaaaatgctgttggtccaagtagaccatacattcctcctccaatgcaataacagcaacagcagcaacaaccctagaaacagcaaacagttgaggcccagaatcctgacagattaccttctcaatctgtccagaatcctaagaatgtgagtgccattacattgaggttgtganagcagtatcaaggacctcaaccagtatcatcttcctca

SEQ ID NO: 13679 - DNA, 477 bp, Glycine max
  unsure at all n locations
taagctcgaggtcacaatgacattgactgggctagagatgaagatgatcatattagttttattggatatatgtttttcatgggaaatacaaccttcacttggatgtcaaaaaagtagtcgatatatagtcattcttttgacttgtaagccaaaatacgtagcagttgcttcatgcatttgtcatgcaatatggctcaagaatttgttaaaagagttgggcatgtcacaagaagagttgaccaagatcnttgtcgataattaataagtcagtcattgctctagcaaagaatccaatgttccatgatcgaagcaaacatattgatacccgttaccactacataaaggagagcacaacaagaaaggatgtacatgcaggatatgtgaagtctcaagaccaagtagttgacatcttcaccaagccgctcaagcaagaagactntatcaagttaaaaagcttacttggaatgataaatcaag

SEQ ID NO: 13680 - DNA, 409 bp, Glycine max
  unsure at all n locations
gcttaatgaattactgttgtattgaaaaatgtcttttgagataacacgttaccaaagactcattacgaggcaaagaagatattatgtcctgttggaatggaataccaaaaaatacatgcttgccgtaatgaatgcattttgtatagacatgagtttgctgaattgtgcaactaccctacatgtggggtgtcacgctacaaagtgggttctggcgcttccagtgaagctggatccacatacattgatcggccagcaaaagtgtgttggtatcttccagtaataccaaggtttaagcgattgttngctaatgcagaagatgcgaagaacctaacatggcatgctgatggtaggaccaaagatggatngctccgtcatcctgctgattcttctcagtggaagaaagttgatc

SEQ ID NO: 13681 - DNA, 415 bp, Glycine max
  unsure at all n locations
tacactacgaacacacaccctatcttgtacttctttactccatcagntcccactctaaaactactctctctccttgcgactatcgactctaactgggctgacaagaatgggtcagacttctgacccccacggatctcgctcaagagttcgaaggtgactctcaacatacccaacttaatgctactagaggtgatctcacatgccaaactcatgtctctaaactgctctaagaggtccagctctgtaaccatcaaagcagacatttgaagggatttcctacttaatgcatccgctactacacttgctatacctgagtgaaagctaagctcaaaatcgtgatccttaaggaactctaaccatcttctttgcctcatggtatgctctttttgatcaaacaaatatgtaaggctcttat

SEQ ID NO: 13682 - DNA, 488 bp, Glycine max
tactaagcccgatggtgaccaagtattggccatgcacctgaaactgtaggagcttctttttatctttgggcaagtttgaggggattatacagaaacaaacagaagaggattagagaaacaaatccaatggcagtgacatttaggtaattgagaataaaatccatccgagttaattaagtttgtgaattgtaaggcctgaagagatatgcaataatgctgtccttaaatagattattcattgatatgtaaagaatgaaaaagtcaagtgtatggcaaggggtgaagaggacgtacattaaaatttagggctctaagtcaatattaataagacaagataagtttataggataagaattgaacttgattttcttgcacatatttgatgaagaggaatgaggagtttaagtgcatttaagctcctaaacaaaaattagtcttataattaattagtctaaaaaaataaaacttgtaaattctttaaagattta

SEQ ID NO: 13683 - DNA, 278 bp, Glycine max
tctagactctttctgacttatctaaaacttttgagcgagaatgtgatgcctctagagtgtgagttggagctgtattgatacaacgtgggcaccctattgcttattttagtgaaaaactttatagtgccaccctcaactacaccacctatgataaagagctgtatgccttaataagagcccttcacacttgggaacattaccttgtttccaaggaatttgtcattcatagtgatcatcaatcacttaagtacattagagggcaaagcaagttaaacaat

SEQ ID NO: 13684 - DNA, 427 bp, Glycine max
  unsure at all n locations
gctatgctganacattacaatagacctcctcatccttttatcaaaatgaaccacaacagaacaattatgacctctctagcaacacatccaatcccggatggaggaatcaccctaatctcagatggtctagtcctcaacaacaacaacaacaacctgctccttccttccaaaatgctgttggtccaagtagaccatacattcctcctccaatgcaataacagcaacagcagcaacaaccctagaaacagcaaacagttgaggcccagaatcctgacagattaccttctcaatctgtccagaatcctaaaaatgtgagtgccattacattgaggttgggaaagcagtatcaaggacctcaaccagtagcatcttcctcatccgcaaatgaacctgcccaactttactgtactctagaanaagaggatga

SEQ ID NO: 13685 - DNA, 440 bp, Glycine max
  unsure at all n locations
tgctgataataagggaaacaaactcaccaatctagtccatatcttgacaaatataaggcctaatgcccagtcttgataaaggaggaatactggactttcatccactggaactctcattggcacaatgaccaaaagctcaaagagaagcccaataagcactgggataacaaatatctgtgaccaaaaaaagatggattaatcacttaaaagcaaatacagatctatgcaaaatcaaagggtcagccttggtaacatgatcagcaagaggaatcatccttacccatatagacagaagtgcagaactcttcacaagaatgccacaccacttccataattggccaaacaaaaccgaagatctcctttttcttattngctcaattgagtatctaactccagcaacagcagtccagatcacatagcttccaatgataaatgcatac

SEQ ID NO: 13686 - DNA, 383 bp, Glycine max
agcttgagggacaacttgatgccttggtctttctttaactcagcttgccatgaatcagagatctgcatctacacctgttgcacgagctcgtggtctatattcttctacaaatcatgatacagatctctgtccttctttgcaacaatctggagtcaatgagcaacctgaagcttatgctgcaaacatttataatagaccctctcagtagcaaaaccaacaacaatataataattatgatctttcaagcaacagatataatccaggttggaagaatcatccaaatctgagatgggcaagtcttccacaacaacaacagcctgtcccttctttccagaatgctgctggttcaagcaggccatatgttcctcctccaatgcagcagc

SEQ ID NO: 13687 - DNA, 467 bp, Glycine max
  unsure at all n locations
ngatgatgcttcatacatctcanaactcttcttagggaagttgtgagactccatggttngcctaggaccatagtgtcagatagagatgcttagttccttagccacttctggaaaaccttacgggccaagctaggaactaagtttcttttctctgctacttgccatccacaaactgatgggcaaacagaggttgtgaataggtctatatccacccttataagggcttttctgaaaggcaaccataagtcttgggatgagtatcttcctcatgtagaattctcctataacagggggttcatagaaccaccaagcaatccacttttgaggttttctatgggttcaatcctctaacacccttagacctaattcctctcccacttgacacttcttntatacataaagaagaggaatctatgtcacagtttgtaaagaagttgcttgagatggttatgaaccacatagagaac

SEQ ID NO: 13688 - DNA, 452 bp, Glycine max
  unsure at all n locations
tatgccaaaactgtcattatattcttcggatatagtatcttcaaagcttgagtgttgaagtgaccaaatcttcaatgccataaccatgaatcatctattgtaactctcatggcaatgccagtattagtagtatacttaaagcttattggaaaaaacttatatttcctttctccattttaacattggcaatctcttggcctttgttatttntatcatagataatgcacgtatcttcttcaaggtgaagataatagcctttctccatcatttagccaatgctcaagagattttctttatgatctggaactagtaagacatttttttatgatctctttaccttctttgtctccaccatgacagagccttttcctcttgactctaccatggtgtcatattccatttgaactttgactttgacagtgtcgtcaatttcctaaaaatgctccataatt

SEQ ID NO: 13689 - DNA, 334 bp, Glycine max
gctctccagacattcaaattctcatatactttcacactggaacaccgattcatgcgcataatatatcgagactctcgacattgaacaacgaaagctctctatatattcaaatggtcataactaatcacacagaagtccgattcacgcgcatattctatggagacgctcctaattgaacaacggacgctctcaagaaatttaaatggcataacttgcacacggaagaccgaacacgcgcatatatacagagacctcaaattaacaacggagctctcgaaattaaacggcatacgtataacggagaccattacgccctataaccagacgctcaaat

SEQ ID NO: 13690 - DNA, 374 bp, Glycine max
  unsure at all n locations
atgaaccttgtatccctgtcagatacaatactatgaggaattccatgcaaccttactacttgcaagacatacaactccactaacttattcattctatacctcatattcactgtgatcaaatgagcagatttggtgagtcgatctactatgacccacacggaactttgcccaccactagtcttgagtggaccatagaccaaatccatatatatgctcttccatgcgcattccggaatctgctatggcgtcaattctccccatggtcgtttgagcgtcaaccatatccttctgacatgacacacatcttgctacatattacgctacatctttcttgatgccatgccaccaanaacttctcttatatcttggacatc

SEQ ID NO: 13691 - DNA, 424 bp, Glycine max
actgatgaagatgaattctttgctacttcattctctcctctaatgacaatagcatcattattggcactgaattcctgcgagttggatgccatcttatcaattaaatttatggcttcagcacgggtcatgtctccaagggctccaccactggcagcatctatcatacttctctccatgttgctgagtccttcataaaaatattggaggagaaactgctctgaaatctggtggtgagggaaactagcacataattttttaaatctctcccaatattcatataggctctctccactaaattgtctaatgcctgaaatatctcttttgatggtcgtggtcctggaagcacggaaaactatttctaataatactctgttgaggtcatcccatctcgtgatggaccctggagcaaaggtatataaccagt

SEQ ID NO: 13692 - DNA, 398 bp, Glycine max
  unsure at all n locations
cgagcgtctcgatctattacgcgactcaatccgactntcgagtgaaaagttattgtcgttagaatttgctacgatcttcgattttaaatttcgagcgtctcaacaagttacgggactcaatctaacttccgagtgaaaagttattgtcgatcgaatttgctacgagcttcgattttaaatttcgagcgtctcgatatattacaggactcaatcggacttccgagtgaaaagttattgtcgttcgaatatgctacgagcttcggttttaaatttcgagcgtctcgatatattacgggactcaatcggactttcgagtgaaaagttattgtcgttcgaatttgctacgagcttcggttntaaatttcgaacatctcgatatattaagcgactcaatcgga

SEQ ID NO: 13693 - DNA, 451 bp, Glycine max
tctctcagtcgtctgtagagatgatagtgtgttagaaagcggcgatgcctactgtagactgtttctctcccatgtttcagttgtgtgtaacttgtattttcttcacacatggggcatgcgtgatgacccttaacactgtaaccgctgagattcccatatgctgggaagtcattaatggtacaaaaaagcattgcacgcatttcaaatgtctccttgcgaaacgcatcaaacactacaaccccctcgtcccacaactttctcagatcttcaaccaacggacttagataaacatcaatgtcatttcctggctgtcttgggcccgatatcatcatagacaacatcatgtattttcgcttcatgcacaaccaatgaggccaattgtaaattacttgcagaactggccatgaactgtgttgagtgcttaaggtgccatatggattcattccatcac

SEQ ID NO: 13694 - DNA, 430 bp, Glycine max
  unsure at all n locations
agcttgtgcacatcaagtgactcccgcattttatctctagcatgcaggccccccctctgcatctacgataccagaataactctgatggtagtaatctttacaactggagagaatatctctnnnnnacaattccttgtttctgctgaaaccctttcactacaagtctcgccttgtatctttntctaccgtcagattcttcctttagcctatagacccacttattttgtaacgctttcttttcttctagcaatttagttaaagaccatgtcttattcttcttaagggaggtcatctcatctatcattgctagctcccactcaatagagtcattcccctgcatagcctcactgaaatattatggctcaccagcatcagttaacaacatataatgcaatgaaggggaatacctatctggtggtactagaattct

SEQ ID NO: 13695 - DNA, 412 bp, Glycine max
  unsure at all n locations
tatgctgcanacatttacaacagacctcctcaacctcagcagtctaatcaaccacagcagaacaattatgacctctccagcaacagatacaatcccggatggaggaatcaccctaatctcagatggtctagccctcaacaacaacaacagcagcctgctccttcctttcaaaatgatgctggcctaagcaagccatacattcctccaccaatccaacaacagcaacagccccagaaacaacaaacagttgaggctcctccgcaaccttccctcgaagaacttgtgaggcaaatgactatgcagaacatgtagtttcaacaagagaacagagcctccattcagagcttaactcgccagatgggacaattggctacacaattaaatcaacaacagtcccagaattcttgacaag

SEQ ID NO: 13696 - DNA, 455 bp, Glycine max
  unsure at all n locations
tgtccaatcaagtacggganatgccttcataagcatatctgcatattgatcacttgcaaggtagatgaaggaattgtagttgcttatcgagttccaaatgcttggttcaagcatggagtacatgattatgagcatgagaaatagtggtcaaattatcaccacaaagttcaggaatagtgtgaggaattttcagcttaaacaacaaggtctgaaatcgttggacctctaaagtacctggagcaaggttccactacttagcttgagtactgcttgaaccagcaatgacagtttggtttttggaccaccaagagaccatgcttggtcctagaaagataaaagcattgaatgtagacctcctgtcattaggatccgaggccgaatgtacatcacaataggcttgaagaataaaagagaatgagagggagcnacaagaacatgaagtctcccatttcact

SEQ ID NO: 13697 - DNA, 433 bp, Glycine max
  unsure at all n locations
cgtntgtcgtcttcaacggtccctctactggcttaaacaagccagctgacaatggttcacaaagttatctagtttcttagtctctcatgggtttcagcaatctaactcagaccaatctctcttcttaaaactcactaagtcagtcactaccatactcttggtgtacgtagatgatatcatactcacggtgaacagtatactggaaatacaagatatcaccaccctcctggatcaggaattcaaaataaaagaccttggcgacttgaagttctttctgggactcgagattgcccgcaccactgatggaattcatttatgccaacgaaagtatgccttagacattntattngattcaggtatgctaggttgcaagccacactcgacacccatggattattccatgaagttacaaatgaactcaggcaactctctt

SEQ ID NO: 13698 - DNA, 395 bp, Glycine max
  unsure at all n locations
cgagacattatatattaaaactagactcaatatcactgagactcgccataattctatattaattgccatatatatgttactatatattntacctttctaaatttatatatgaatttaatcagttgtaataataagccaatgtcgattaatagttaatttatgtaatatatgtctaattttatttaattaagatgtcagaaatacttttttgcaaatgaaaaaacactatatctgaaaattaatccaagaatactgtaaatattatgaactcaaacagaattgttttatatataaaaaaaaaactgtgattntaatagtacttaatccatcatatgatgcatatatctatgaaactacatgaatatctgcacgtatctataaactctaattaaact

SEQ ID NO: 13699 - DNA, 457 bp, Glycine max
  unsure at all n locations
agcttaagggtttggaataattgttctacttcttcaatgttcaagtcttctttatatagcttgccccccaacttatnntgggggngatacacctaagaagaatggctagatgtttgtgatgaagcaagaattgggccgggttgacaccaccctacactccacaacacaatgggttagcagaaaggaagaatagaaaaattatgaatgcggttaggagaatactcaaatgcaaggatctgccacaaaacttgtggagtggagctgcttccactgatgtgtatgtgctgaataaaagtgctacaaaaagactaaatggtgtgactctagaagaagcttggtcaagcatcaaacccaatgtgaagcatttgagaatttttggtgctatntgctacaaacacattactagctagttgagacagaaactggatgacacaggtgaattgatggtatttcttgg

SEQ ID NO: 13700 - DNA, 401 bp, Glycine max
taaggctgagcgtgatagaggaatcacaatttatattgccttgtggaagtttgaaaccaccaagtactattgcacagtcattgatgcccctggacacatggatttcatcaagaacatgatcactgggacatcccaagctgactgtgctgttcttatcattgattccactactggttggtttgaagctggaatttcaaaggatggacagactcgtgaacatgctctgctttcattcacccttggtgtgaaacagatgatttgttgctgtaacaaggtaaattatgtgctgtaatttaaggcccttatgtctcctttacatcacacaatatcttcattccttttgtgtgttcatatgagattaaatagtgttctcttctcattttatacagatggatgctact

SEQ ID NO: 13701 - DNA, 403 bp, Glycine max
cttgaatgctctattcaatggagttgacaagaatatcttcagactgatcaacacttgcacagtggccaaggatgcgtgggagatcctgaaaaccactcatgaatgaacctccaaggtaaagatgtccagactgcaactattggctacaaaattcgaaaatctgaagatgaaggaggaagagtgtattcatgacttccacatgaacattcttgaaattgccaatgcttgcactgccttgggagagaagatgacagatgaaaagctggtgagaaagatcctcagatccttgcctaagagatttgacatgaaagtcactgcaatagaggaggcccaagacatttgcaacatgagagtggatgaactcattggttcccttcaaacctttgagctaggactctcggat

SEQ ID NO: 13702 - DNA, 429 bp, Glycine max
  unsure at all n locations
ctttgaatctatgcttgttatntgatcactntgtatagtatgacgcacctagttgctcatgatcctgtgaatntaaataaaacaagcgcaagctcggaaggtagtcatacctcacaaaatatatatttgtatgtttaggtagtgaaaataccttaaatatgcatgtatgtaaaaaaaaaaaaaaacacttcacaaaatatatatatgtatgtttaggtagaaagataccttagatatgcatgtatgtaaacaaaaaatacttcacaaaatatatatatgtatgtttaggtagaaagataccttgaatatgcatgtatatagcaaaaatatctcacaaaacatatatgtttaggtagcaagataccttggacacgcatgtatatggcaaaatacctcacanaatatacgtatgtttatggtagcaaatac

SEQ ID NO: 13703 - DNA, 364 bp, Glycine max
  unsure at all n locations
agcttccatgagtcangcaaaggagatggcttgaccctgtcctttgagatggtcatgatggcacctctcacacnnatgtcccgctatgcttataatatatcgatacgctctaaattaaacatctaaaactctcgctnnntcaaatggacataatatttcatacggatgtccgattcaggcgcatcatatgttgagaagcttgaaattgaacaacggaagcctatgagaaattcaaatggtcataactttaccacggatgtccgattctggcttatcacatatcatgacactctaaattgaacaatggaagctcttgagaattcaaatggtcataacttttacaccgatgttatattaaggcgca

SEQ ID NO: 13704 - DNA, 351 bp, Glycine max
tcaacatcagaccacttccaggtgctggaactacttcacatggacttgatggggcctatgcaagttgaaagccttggaggaaagaggtatgcctatgttgttgtggatgatatctccagatttacctgggtcaactttatcagagagaaatcagacacctttgaagtattcaaagagttgagtctaagacttcaaagagaaaaagactgtgtcatcaagagaattaggagtgaccatggcagagagtttgaaaacagcaagtttactgaattctgcacatctgaaggcatcactcatgagttctctgcagccattacaccacaacaaaatggcatagttgaaaggaaaaat

SEQ ID NO: 13705 - DNA, 426 bp, Glycine max
  unsure at all n locations
cagcttatccttatggcttgcctccggacttcactccccgtaccgccctcccnccctcccattattggacatcgcgtgatatgttatgaccatttgtatttgtctagagcttccgttgannaannnaagcgtctacatgtattatgtccccgaatcggacatccgagtgaaaactgatgaccattcgaatttctcgacagcttccgttgttcaattttgagcgtctagatgagttattttcccgaatcggacatccgtgtgaaatgttatgaccattcgaatttctgcagagcttatgttgttaaatttcgagcgtctcgatatattatgtccccgaatcgaacatcctagtgaaatgttatgaccacttgtatttctcgagagctttcgttgttcaatntcgagcgtctcgatgatatatgttcc

SEQ ID NO: 13706 - DNA, 430 bp, Glycine max
  unsure at all n locations
agctggaaattgaacaactgtagctcttgagaaattaaatggtcatactcccttctcactcntatgtccattcatgcgcatcacatatagagacgctaaaaaatgaacaacggaggctctcctaggttaaaatggtcataagttttcacactgatgtccgatacaggcttatgttatatcgagacgctcaaatataaacatcgaaagctctcgagaaattcaaatggtcataacttttcactcggatgtccgattcaggcgcatnanatatacagacgctcggaaatgaataaaggaagctcttgagaaatacagatggtcataactttttacactgaggtccgattcatgcttataatatatcgagactcttgaaattaaacatcgggagctcttgagaaattaaatggtcataatctttcacacggat

SEQ ID NO: 13707 - DNA, 444 bp, Glycine max
gcagctgcatttgaattttaccatcaaattctcaataatacatgttccctccttcaaaattgctatgtgagaaccatgaagggagagaagtcgaacttccagatcagagcatctttcttttagccaaacacgatacggattgtgatagaaacagcataaattgtgtagttcttcatcctctggaagatagccctgcttgtcaacacagcactcacaatcacactgagtccgggctccgtcaagacaatgtcagaggcactccttgctgcgtcggttgcatcatacactgcaatgccaatgtctgctttcttcaatgctggtgcatcgttcacaccatcttcggtcattccaacaatggtgattctatcctggaacctcttcacaatctcatacttatgctctgcacatgtagaaaatctcactcagttttcttattaaccttat

SEQ ID NO: 13708 - DNA, 441 bp, Glycine max
gctctttcaactgcacaaggctcttaatatttgaagagtattcttgtggaatctcttacccgacgaagacactgacaaaaacttatcttctccttattggacaaagtatggcaagctgggggcaagtaaattctcttcccattataccttggatgcaactgtgatcatatgcccatatcatctagatcttgacgggtattgaagccgtgcttcgtcttgccttaaatgttaaggagctgtccaatcacactgtcacaaacatatttccccacatgcataacatcaatacaatgtctaacgtctagatcagaccagttcagaagatctaagaatatgaacctcttcttccatatgcaactcttacttttatccttcttttgggtctttcgaaattcagtattcaggtattgaacccgctcatatacctgctcaccagtcaac

SEQ ID NO: 13709 - DNA, 417 bp, Glycine max
  unsure at all n locations
agcttgtcgtcgagatcaccaaaagcagttgtggcaaaacgagactccaaagcctggaggagnccnnccccctncttttgcttgatttgtttggtgtaaggcatattagatcntgtctgtgctattatgtgcgtatttannaaattcttcaactgaaactatatgttccaagtactctatctacaatacaccaaaagagcatttagacaacttagcaaacataacattttctttcaacactgtcgaaacaacctatagatggcataagtgttcatgccatgtggaactatataccaatatatgatgaaaaaacactaacacatatttccttaaagcatgttggaaagtatggttcacaaacattgaatagaagccggagcattggttaaaccatatggcattacaaccactcataat

SEQ ID NO: 13710 - DNA, 313 bp, Glycine max
acaccactcagatttccatatcgggaaagtcattaatggtacagaaaagcattgcatgcatttcaaaagtctccttggaaatgcatcaaacactaaaaccccctcatcccataactttctcaggtcttcaatcaacagacttagataaacatcaatgtgatttcctgactgtcttgggcccgatatcatcatagacaacatcatgtattttcgcttcatacacaacctatgaggcaaactggaaattactagtagaactggccataaactgtgttgagtgcttaaattgccatacggagtcattccatcactg

SEQ ID NO: 13711 - DNA, 427 bp, Glycine max
  unsure at all n locations
gcttgtggggacagtaaagaaagaccattctctggaatacacaatgtcaggcaaaaatattagcagaacaaggagaaaaattgcacctataaggattacgcgagcaatagccatggtgtaagagaaggaatataagaagaggaggtagaggcctgtgacaagggcaaggatgttgaggcagagaaaaaccgatgtatcgcgctgaatggtgtcaacagaatgtggttgaggctgtggttgattgagaattgggatgagtactagtccagaaattagcacaggaacaatggcattgagtaatagatagacagtgtcatcattngtgtttattgcattggcaatgagagtgtacaaagctgcactcacaccattgaaactaatgctcaaggataatgcaagggaacggtttgccggaaaatgtctgatg

SEQ ID NO: 13712 - DNA, 403 bp, Glycine max
  unsure at all n locations
gagttntccgactatgctcttgtgtggtggaacaagctacaaaatgagagagcaagatatgaagagccaatggttgatacatggatggagatgaaaaagatcatgatgaagcggtatgtgccggctagttactcaagggacttgaaattcaagctccaaaaactaacccaaggcaacaagggggttgaggagtatttcaaggaaatggatgtgctcatgaatcaagcaaatattgaagaagatgaggaggtaactatggctcgatttcttaatggtttgactaatgatatccgtgatattgttgagctgcaggagtttgttgaaatggatgatttgcttcacaaagcaatccaagtggagcaacaattaaaaaggaagggagtggctaagaggagttttacca

SEQ ID NO: 13713 - DNA, 390 bp, Glycine max
  unsure at all n locations
catgcaagctngaggatagagacttcttaagctatttatcttctctcttagagaggcttactcaagccaaaccccttaccttcttgataacagataagctgattaacaccagttgtgatggatgcaacccctattggtntaaanttaggggatagtagctctgatgttcccaagaactcgacctttaagagagctgacatggtgtttgttactatctggtctgcgtgccctcgtaatgaccttatgactgaatgtacatttttcctggtggaattaatccaaggaaaggatatgtgggttcctgcttatgatgaagatgatttttgcctgcgctataagtggtcaaaacctttcagactcagtttacatagtaaagctactcatataatg

SEQ ID NO: 13714 - DNA, 356 bp, Glycine max
  unsure at all n locations
caaaaactttgtcatccctctgtaagatagcaatgggaataaagacatcacattctttattcatcttacgaataaagaaaactaaattatatttgatggtcaaaaaaggaaattatcaacatgccttaagatacaatgtaaggcgaagttctcttggaatcagcttctcaggatctgtctcctcagatattgtatatgagctaacatntgcctctacttcccaaacatattgcttatcggattctggactctttgttgagacaaccaccttcatacaaccaaaaattatataaataccagatgacacagatagtactacagcatcacatttacttttaccaaaatgcatacccgat

SEQ ID NO: 13715 - DNA, 401 bp, Glycine max
gaattctactctaataatttccatgagtgctcacgtacatgccaatattacaattcatgcatagatatcatgaagaactatataatcatctgtcatagatattactctcttgaactattaaatatataatgagagattcacttgcttcactccaagagtataacagcattgcccattcgtattatttatctttctataaatctaatgatgaagactagttacttattaaataataaaaataaaagataactctaacagaattatctttggaataagtggatctctcctctctttaatataattagcttaattgtagttgtgtagttcttactttatgtctattcataaaacttagtctaattgttgtatatattctgttgtggaccggaatcacatggaat

SEQ ID NO: 13716 - DNA, 265 bp, Glycine max
acaacaacagcttatccttactttctagaatgctgctggttcaagcaagccatatgttccttctcatacaaaacaacagtcacaaaaaagacaacaaacaattgatgctcctcctcaaccttacttataagagttaacgatgcaaatgaccatctcaaatatgcaatttcagcaagagacaagagcctccattcatagtctaacacataaaatggggcatatggctactcagatgaaccaagctcaatccaaattctgacaaatt

SEQ ID NO: 13717 - DNA, 332 bp, Glycine max
gcgtctcgagatattatatcctcgaatcgaacatccgagtgagatgttatgaccattcgaatatctcgagagcttccgatgggcaattttgagcgtctagatatattatgtccccgaatcggacatccgagtgagaagttatgaccattcgaatttctcgagagcttccgttgttcaatttcgagcgtctagatgagttatgtccccgaatcgaacattcgtgtgaaaagttatgaccattcaaatttctcgagagctttcgttgctcaatttcgagcgtctggatatattatgtccccgaatcgaacattcgagtgaaatgttatgaccat

SEQ ID NO: 13718 - DNA, 486 bp, Glycine max
  unsure at all n locations
ntcactctntgaacanatacccctcagccaaatagaatccatcttgtgtccttttcccacaactctcgtaaatgggagagaaatattcatctaaagcatacaagtccctaatattatcaaatcttaaaatttgagctcctaaggagaaaaacaatgtgtgtctcctagagaaggcatcagctaccacatttgtttttccctttttgtatttgataacatatggaaattgctctatgtactctacccattttgcatgcctcttgtttaacttgctttgccctctaatgtacttaagtgattgatgatcactatgaatgacaaattccttggaaacaaggtaatgttcccatgtctggagggctcttattaaggcataaagttctttatcatacgtagggtagttgatggtggcactgtgaagcttttcactaaaataagcaatagggtgcccacctttgtacaatacatgcttaacttccactcttg

SEQ ID NO: 13719 - DNA, 471 bp, Glycine max
agatggcctcagcatattccttatctccagaatgtgaattctatcaatagacctccaatctttaatggagagggttaccactactagaaaacccgaatgcatatctttatcgatgcaatagatctaaatatctgggaagccatagaaatagggccttatatacccaccacagtataaagagtttcaatagatggtagttcatcaagtgatagcataaccatagataaacctagagatagatggtctatagaggatagaaaacgagtacaatacaacttaaaagccagaaacataataacatcttgcctaggaatggatgaatattccagggtttcaaatagttagagtgctaaggaaatgtgggacactcttcgattaacacatgaaggaactacaaatgttataagatctatgataaatgcactaactcatgagtatgaagtatttagaatgatgtaaatgaaatattca

SEQ ID NO: 13720 - DNA, 471 bp, Glycine max
ttctccttgcctagcacttcagaaccttctagttgggtcatatagatgtcttcctctaaatgcccatgcaagaatgcagttctaacatctaactgctccaagtgaagattctctgcagctactatgctcagaataactctgatggtagtcatctttacaactggagagaagatctctgtgaaatcaattccttgtttctgctgaaaccctttcaccacaagtctcgccttgtatcttcttctaccgtcagattcttcctttagcctattgacccacctatgctgtaatgccttcttttcttctggcaatatagttaaagaccacgtcttattcttctgaagggatgccatctcatctttcatcgctagcgtccactcaatagtgtcattcccctgtgtagcctcattgaaacattctgactcaccatcatcagttaacaacaaataatgcaatgaatgcgaatacctatct

SEQ ID NO: 13721 - DNA, 308 bp, Glycine max
tactcaagctaacaatccttgtgatctattatggaatatttctatgcctatcacatagcttacctcatccatatctttcacttcaaagtttctagagagaaatttcttagtctcatgaagaagacccagatcgttagttgcgagcatgatatcatctatatacagaattagaaaataaccttacgtccactgaccttcagatacatataccgataaatagtattgtccttgatctaaaggaaacaatggtatattaaacctcaaataccattggcgggaaggttgctttaagactggatattgatttc

SEQ ID NO: 13722 - DNA, 472 bp, Glycine max
  unsure at all n locations
gtatcgtgaagtgtcgagggcatntacattttctgcagaaggaaagacgcaatcatgtccggggcttccagctcgcgtgtttatatcgcacgttcctgaatggacctccaatgttggttactacaataaaactgagtacttaaggttggagcacgcaaggaatcacgagattcgtggatctattgctcttcctatatctgatgtgcactctcaagtgccatgtgctgtattggaactagttactacaaaggaaaagcctaactttgacagagaattacaaattgtttctcaagcactccaggtggatttttctttgtgctacttctagcatatacttcaatttcttatattgattctgtctggcaaatctgtgttattctattagagatttggatgtcttattaaaaagggtatcatggagaagttcttaccttgtctgacaaacgatgcttgattttttatttatatgatg

SEQ ID NO: 13723 - DNA, 416 bp, Glycine max
tgcctaattatcctgaaattgagagacaatgattattatacacacacagtgaaaatattaagtatttattacctctacttaacagaatatacttataacattacaaaataaccataaatggggagagtatgatacaattgatacagatcttatacacgacagttagtctgtttcaccgactaacattattcggcactcaatgagccctttctccaatctaatcatcttggttgagaagaaagacgaatcttggcacatgtgtgtgtattttttaactctgaacaaggcttgtgtcctatataggtaccttatcccaaccattaatgagttactagatgaactccatgtttctaaattcaatgtgaagagtgatcttaaatcacgatttcactagattcatatgcacgacagtgaca

SEQ ID NO: 13724 - DNA, 309 bp, Glycine max
  unsure at all n locations
ctcagcttctcatatattatgcgcctgaatcagacttccgtttcaaaagttatgaccatatgaatntctccactgtattccgtgtgacaagttatgaccatttgaatttctcgatagcattcgctgatcaatttcgagcgtctcgatatattatgcgcctgaatcggacttccgtgtgacaagttatgaccatttgaatttgtcgagagcataccgnggttatatttcgagcgtctcgatatattatgcgcctgaatcagacatccgtgtgacaagttatggccatatgaatntctcgagagcattcgt

SEQ ID NO: 13725 - DNA, 415 bp, Glycine max
atgccttgacatttgttggtcaagcaatttctaatgacttccaccttggctttatcaacttcaatcccaccaacaaagatcttgtggcttaaaacaatgccttcagttaccataaaatggcatatttcccagttaagtacaagattggtttccatacactgctttagtacggtgtcaagtttataatggaatgaatcaaatgaagacccaagaacatagaaatcatctatgaacacttcaatgctcttttcaacaagatccacaaatatggcaagcatgcattgttgaaatgtagcatgagcgttacaaagaccaaaaggcatcttcctgtaagcgaaaacactataggggcaagtaaaagttgtcttcccttgatcttcaggtttaacagggattcgattatatactgaataac

SEQ ID NO: 13726 - DNA, 438 bp, Glycine max
  unsure at all n locations
tttcttaatcttacanattaatgcaataaatattatattttgagactaaaatttcttaattaccatttctattaactttattaataattactattcgctaagaaaacctgactcatcagtgttaatgaagcttcctgtctctttaataatctccaagactcacttttaagactttgttcggtgactgatgatatggtggttcttgacggactaaaatagtaatttaataaaaaaaactgttttttaaagaaattactttttattatcttcaagtgagccataagtacaagtagttaatgtgtaaattaaaattaaatcatgttagatattatttaaatataattattaataaaaacaaattttaatcagatttatcttaccttttaccaaattacataacagtcacactctcattacacgaatttggattaatactaa

SEQ ID NO: 13727 - DNA, 348 bp, Glycine max
attttttttgaatctactctaatcagtcatacaaaccacacgacaatggagaatatacatggagaataagatcaagaacaaggaattaaagagaattcaccgaacaaaaagatagaggaagcaaaagaacatcacctagatgaagatgctcttgataccacatgatgtaagctccatcggagcttgtaggcctaagatcttcttcatcaatggattcctttgcttcttggaagatgaatggcagcggaatggataacgaagagagagaggagatgccacttcaaggagaagatgagtctagaagaagctcaccaccatacgaggccattgattagagcttggatgaag

SEQ ID NO: 13728 - DNA, 421 bp, Glycine max
  unsure at all n locations
tcngtattcaatttcgagcgtctccatatattacatgactcattccgacatccgagtaaaaatttattgtcgtttgaatttgctcagaacttcggtattcaattctgagtgtcttgacatattacgggactcaatcgcacatcagagtaaaaatttattgtcgattgaatttgctcataacttcggtattcaattccgagcgtctcgacatattactggactcaatcgcatatccgagtaaaaagttattgtcgtttgaatttgctcagagcttcggtattcaatttcgagcgtctcgatatattacgtgactcaatccgacattcgagtacaaagtttttgtcgtttgaatatgctcatagcttcggtattctatttcgagcgtctcgacatattacgtgacttaatccgacatccgagt

SEQ ID NO: 13729 - DNA, 381 bp, Glycine max
  unsure at all n locations
cttttganagacacatctcttcataccatttgaaaaggcacgaatggcctatatatatgtgtgtatgacttccaaaagcaagagagagatattccaagagaatttcattgtcaaacgctctctcgacaactcttgggcaaacacttgcaaatctattgagagttcattcaggaacttcaaattggattatccactctataggagcgaaatctttttgttcttctcacaaagtcaattgtaatcaagagactggttgtctcttgaattgtgagtttcctaaacacaagggaaagggattccttgngtgttcaacagttgtaacaaatatttttacatagatagtggaaaatctcaagtgggttgcttgaggactggacgtat

SEQ ID NO: 13730 - DNA, 443 bp, Glycine max
  unsure at all n locations
ttacggacctttaatctcagcttcacattcaattcaagcgtctcgatataatacgggactcaatcagacatcggagtaaaaagttattgtcgtttgaattgcctcagaggttcaacattcaatttcgagcgtctcgatatatttcgggactcaatcagacatccgagtaaaaagttattgtcgtttcaattggctcagaggttcaacattcaattatgaccgtcccgatatattacgtcactgaattcgacatccaagtaaaaagttattgtcgttggaattgctcaaagcttaaacattcaatttcgagcgtctggatatattacgggactcaatcaaacatacgagaaacatgttattgtcgnttgaagttgctctcaactacaacattcaatttcgagcgttccgatatattacgagagtcaatcatacatccgagtaaa

SEQ ID NO: 13731 - DNA, 472 bp, Glycine max
  unsure at all n locations
tgcgaagacaaacattcggaaagttagtttacaagataacgcttattttagagcacaaacgacatgctaatctttccgatttagaacaaactggtgcacacatttccttaacgtaaaacatttatgaacatgcgtatgtgtaaactatcctactatttacctcaacatacaaggatattcaaaatattctagttactacacatatatatactgttttgaaaagaatacatatgcacacgctcaaaatattgtgtcaagaatacacatgttcatatcctaagcatttcgttaccacaaactacacatttgaagtattttatttaacatacaaatctttgctgttttattcacattatttatacacatatgcacatcggagagccaatctcacgtcacgcacacacttgcatttgaatagagactttcatgtcatctatttacactngaagggcaatcccacatcatatatcca

SEQ ID NO: 13732 - DNA, 453 bp, Glycine max
  unsure at all n locations
gaacttttctttacatgtgctatgtggctcattctcctttgcaagcaagtaaaattttttggaagttcttctaatgtagaaccatttctcatcaatgaacacaatattttccatagacttaaactntggatcataaggcatgatcctatcatcgagcattgacaagaaaaactttaagcaagcaatcatgttctcaggctttaaatatggcttaagtgcatttgaatggcatngtataactcctgctnttngcaatctaaacaatgatgtcgtgttaatattcaaagcacaagataaagaccgaagggtagtactatggaacttcacatagtctctcaccgtttagttgaactctttttctttcatagttctttgttttgttatgagaagcatcacccacaaccttcaattgattccaaatactaccaatgacacttatattcacatcgtaca

SEQ ID NO: 13733 - DNA, 460 bp, Glycine max
tcttagtttcagatgatgcatatgggtgtggagctacctcatgcactcctctaatgactatggcatcatttctggcgctaaactgttgagagttggaggccatcttctcaattaaatctctggcttcagcaagagtcatgtctccaagggctccaccactggcagcatctatcatacttctctccatattactgagtccttcataaaaatattggagaagaagctgttctgaaatctgatggtgagggcaactggcacataatttcttaaatcgctcccagtactcatacaggctctctccattgagctgtctaatacctgagatatctatcctgatggttgaggtcctggaagcagggaaacagctttctaagaatactctcttaaggtcatcccagctcgtgatggaccttggagccaggtaatacaaccagtcctttgccactccctctaatgaatg

SEQ ID NO: 13734 - DNA, 426 bp, Glycine max
  unsure at all n locations
tgtatatngtcttattctatacaagaccactttcatattcttcctttgcattggcataatgttcaattactgtcaaggcttttggagcatctataacttgttcaactatattttgtgcaacatttcggttgataagctgcatcaaatctctctttttcctctgtattctttcagcacgaaagtattttttggttttcaattgcttggcaactttagtttgtatctctcctttgacaatcttcttccgtatcgcatccagagaagcccccttctcaagctcttctaacaattctnttcttgcttcctcaaattccatctaattcaattaagcagtgagtgccacaaagtattgttagagaaaatgaaatatgatcgacaatctaagtaattaatatttaatactcagcagaagaaagaagaaatcat

SEQ ID NO: 13735 - DNA, 417 bp, Glycine max
  unsure at all n locations
gaagtatagcaatataggagatctgttttggttgattgataaggactcaaattntaatcatgggttaaggagttgtacaattgatggagatatattacattagagggatgcttttgaaaatgagaatgagataaatttttattttcatcatgaagtagatccaattatagaagaagtcccacagatgttgtacttggaatgtcatccaattccagaccctgttgctggtgagtagagggatgttgatgttggtgagcaaagagatgctgatgctggtgagtagagggatgctgatgctggtgagcagagggatgttgacgctggtgagcagatagatggtggtggtgaagagagagatgttggtggtggtgcaagcctattatcaccatgcttgaagaaattagaagttacatcatg

SEQ ID NO: 13736 - DNA, 448 bp, Glycine max
  unsure at all n locations
tgagaagctagagcttagctacactcacccctctcataactaagctcacctcctggagaagcttccttaagaagattcctaaagaagctagagcttagctacacatacctctctaatagctaagctcacctccttatgatgagaagctagagcttagctacacaccccctataataactaagctcacccctatggcaaaatacatgaaaatagaaaaaaaaaatccctactacaaagactactcaaaatacctcgaaatacaaggctaaaaccctatactactagaatggccaaaatacaaggcccaaacgaaggaaaaacctattctaatatttacaaagataagcaggctcatacttagtccatgggctcaaaatctaccctaaggctcatgagaaccctanggccttcccttggatctctggcccaatctacttggagtcttcta

SEQ ID NO: 13737 - DNA, 457 bp, Glycine max
  unsure at all n locations
agcttgtaatcaattacacacatactgtaatcgattaccagagatagttttcagaaaatattctcaacagtcacatctntttacttgattcttgaatggctgtcaaaacctatatatgtgtgacttgggacacgaatttgctaagagattttcagaacaaaaaggtcttatcctcttaaaaagaagaatcgttttatcctcttacaaattccttggctaaaacacttgtgattcaataaggaattatttgagtgctcaaatcgttcaatctatctctgtcaagagagatttcttcttttcttcttcttcattctgaaaagggattaagagacctagggtctcttgttgtgaaagaattctaaacacaaaggaagggttgtccttgtgtgtttagaacttgtaaaaggaatgtacaagatagtggaactctcaagcgggttgcttgtggactggacgt

SEQ ID NO: 13738 - DNA, 469 bp, Glycine max
  unsure at all n locations
gcttattagtgcacaactccttcaagtatttagcatatcttagaatttgctntattgcatccagcagaggtatgtttacctctactttcctaaatgcttncagatctccttctctgcctcttccatttttttgttggaaattgctcttggagggaatggaagagggatatgctgcttctctttatattcacctgcatagaaattggtaggtaacttactcttttaatttttgtcttcatctttttctggagtagagtgaggttgggcaggttcatttgcggatgaggaagatgctactgtgtgaggtccttgatgctgccttcctgacctcaatgtaatggcactcacatttttgggattttggacagattgagaaggtaatttatcataattcagggactgttgttgatttaactgtgtagccaactgtcccatctgattatgtaagctctaaatggaggctctggtc

SEQ ID NO: 13739 - DNA, 456 bp, Glycine max
  unsure at all n locations
ntctggttgtacataaaagggttatttctatgtttatttctattattntatttaagctatgccacatgtctccgtttgagtggagcaagaagggcccactttctcttttgattgtgacccatactgatgcaagctccattggagcttgtaggcctaggatcttcttcatcaatggattcctttgcttcttggaagatgaatggcagcggaatggagaaaggaagagagagaggagacgccacttcaaggagaagatgagtctagaagaagctcaccaccataggaggccatggataagagcttggaggaagaaggagatgaatgaagggagagggagagaagagcacgaaattttgtgctctaaatgagctntgaaatctgaagtttaatattcaaatgatcaaagttgaaaaaaatgcacacacatgacctctatttgtagcctaagtgtcacac

SEQ ID NO: 13740 - DNA, 391 bp, Glycine max
agtgaccatgtgaataactcaagagcttccattgttcaattttgagcgtctcgatatattatgcgccttaatcggacctccgagtgaaaagttatgaccatttgaataactcaagagcttccattgttcaatttcgagcgtctcgatatcttatgtgcctgaatctgacctccgtgtgaaaagttatgaccatttgaatttctcgagagcttccgttgttcaatttcgagcgtctcgatatcttatgcgcctgaatcggacctccgagtgaaaagttatgaccatttgaataactcaagagcttgcattgttcaattacgagcgtctcgatatattatgtgcctgaatcggacctccgagtgtaatgttatgaccatttgaattgctcaag

SEQ ID NO: 13741 - DNA, 211 bp, Glycine max
gcctcgctacatatatgcgcccggctcggacatccgcgtgagaagctatgaccatatgaatatctgcagagcttccgacgctgaagtccgagcgtgtcgctatataattcgccagactcggacctgcgcgtgagaagctatgaccatattaatatggcgagagcttccgcagctcatgatcgagcctcgctaaatatgatgcgccacaatc

SEQ ID NO: 13742 - DNA, 217 bp, Glycine max
  unsure at all n locations
gtgtgatgcattaattattcatnggtgtgctgtccttgctcaaaataatgatatatagcctatggtgatatattatgcttctaggactttatacgcccccaagcgaattatactactactgagaaagagttactagccgtaattgttgctcttgaaagcctatgttgattcgatggatgctctggctccaagagtttgacttggagatccgtgatat

SEQ ID NO: 13743 - DNA, 465 bp, Glycine max
  unsure at all n locations
agcttttgatgaggatgaattaataaaatattgtattaatcttgaaattnttttaaggtttaatgaatactctgatattaatagtcttgatttattttcgaattgtaagtattaagagaaatgttaagagaagaaattaacacaccaatagaagtattgagttatattaaaactttagattcttttccaaatgtttacattgcatataaaattntattactgctgaaagaagtttttcaaaattaaaattgcttaaatcatatctaaaatcaacaatattataagatagattgaatgagttagttattntatctattgaaagtgaagtgttagaattgtttgattataaaactctaataaatgattntgcagctaanaaagctacaagattaatataaaaattagtattttatgtaatatactaagtctctctaaaattcttggtaaaaatagacccctttaaca

SEQ ID NO: 13744 - DNA, 466 bp, Glycine max
  unsure at all n locations
tanacattcaacttcgagcgtctcgatatattacgagtctctatcaaacatccgagaagaaagttattgtcgtttgaatttgctcagaggttcaacattcaattttgagcgtctcgttatattacaggactcaatcagacattcgagtaaaaagttattgtcgtttgaattggcttagagcttcaacattcaatttcgagcgtgtcgatatatgatgggactcaatcagacatccgtgtaaaaagttattgtcgtttgaattggctcagagcttcaacattcaattttgagcgtctggatatatgacaggactcaatcagacatccgagtaaaaagttattgtcgtttgaattggctcagagcttcaacattcaatttcgagcgtctcgatatattacgggactcaatcagacatccgagtaaaaagttattgtcggctgaatntgctcagagcttcaacattcaa

SEQ ID NO: 13745 - DNA, 378 bp, Glycine max
  unsure at all n locations
agctttgaaccaattcaaacgacaataactntttactcggatgtctgattgaggcccgtaatatatcgagacgctcgtaattgaatgtgaagctctgagccaattcaaacgacaatnaacttttactcggatgtctgattgaggcctgtcatatatcgagacgctcgaaattgaatgttgaagatctgagccaattcaaacgacaataactttttactcggatgtctgatggaggcccgtatatatcgagacgctcgaaattgaatgttgaacctctgagcgaattcaaacgacaattactctgtactcggatgtctgattgaggctcgtgatatatcgagacgctcgaaattgaatgttgaagctctgagctaattc

SEQ ID NO: 13746 - DNA, 475 bp, Glycine max
  unsure at all n locations
acacatacctctctaatagctaagctcaccttcttgagatgagaagctagagcttagctacacacccnctataatagctaagctcacccccatgacaaaaaacatgaaaatacaaaaaaaaagtccttactacaaagactactcaaaatgcctcgaaatacaaggctaaaaccctatactactagaatggccaaaatacaatgcccagacgaaggaaatacctattctaatatttacaaagataagcgggctcatacttagcccatgggctcgaaatctaccctaaggctcatgagaaccctagggccttcccttggatctctagccaatctacttggagtcttctacccaatgcccttgcggtgtaggatagcgtcattccctccaccttggacagatttgacctcaaatcccgaggttcttcatactctgggctccttccctcaacacctgtaaaaagaacaaaaacatatgt

SEQ ID NO: 13747 - DNA, 390 bp, Glycine max
  unsure at all n locations
agctntacaaggagatattactcttgatgcatagttggatgaaagggataagattatcttgatggataatgctcacaatgcaatcatcttgagtcttaagacaaagtactacgacaagtctcgaaggagaagacaacaactgaaatttggttgaaactagaaggtttatacatgaccaaatctctggtaaatcatctttatcttaaacaagccttatattcatttaagatgcaagaagatataaatgtggaatctcaattggatgtctttaataaactgattcttgatctagaaaatatagatgtgactattgatgatgaatatcagaccctgttactattgtgtgctttgccaaagtcttcctctcattttaaagaaactctcttgtat

SEQ ID NO: 13748 - DNA, 449 bp, Glycine max
ctcttccaatttatggttattttgtagtgttataagtattttctgttaagtataggtaataaatacttagtacttccattttgtgtgtttaataatcatattctctcaatttcaggttaattatgcaagctctgaaaagtgttgtgtttcaccttctcgctaagtcaatctgccttggtgtgggcggcccaccgtctaaggcaatacatgctgagccatactacctgtttggtgtccaagatggatccagttaagtatatgtttgataagcctgcccttacgggatagatcactctatggcaagtgttgctatccgaatttgacatcgtctatgtcaccctgaaagtgataagggaagcgccttggcatatatctggccatctatcaccaattattatcaccctgcatctatgtttcatataggacatcatggcctatcatggaaaact

SEQ ID NO: 13749 - DNA, 472 bp, Glycine max
  unsure at all n locations
tacctgtgcttccgtacacttcagtttaggatgtgatgcatgcccagccaaatcatgctccatgtattcgaaaacaaggtataagctgcaagacatccttgatgtaacaaggccttccagttttatgacatttggatgatcaagcctacgtagaatgtgaatttcccttgccatgaagcgaacactctctggctcaagattatcaaacctgacttttttcaaagcaacaatattattttgctcaagatcacgagccctataaacattactataagttccctgtccaatctgaaaaataaggaggaaaatcttaccattcaaggaaaactaaaacaggctgaagacaatatcatcatttaattgcaatccaagacaaaaaanaacaaanaggatatctataaatctagaaactacaagtattgtacctcaatgttgtgttatctacatcagaggatgaaatcaagaatattaa

SEQ ID NO: 13750 - DNA, 450 bp, Glycine max
  unsure at all n locations
ntctcaaaatccttatctatctacccctctattaactaaattaacttccttaaaaataattacggatgaaaataacgcaacagataatcaaacatcaaacataattactaataatatatagatatatcagggtgttacagagactaaagtagtctcggtgttctttcactaagatgtgagcacgcttagcatagaagcaaacctccaaaccgatcagagcagcacatactttttttttgaagaanaacaatgtgtctactggagaaggaaagcatgctgatagaactttctcacaaccacaaatgagatttaggatattagcatttcgtttctaaatgatcatttagaggaaagactgggtccaactganatagaagaaaatcactcacagtgtataaatcttacacaggcaagtgtttcatcctaattccgaaccatagatatgttatg

SEQ ID NO: 13751 - DNA, 433 bp, Glycine max
  unsure at all n locations
tcacattctatacaaagtcaagtccattgcgtttgttacantattctgcaccaacagaataatgcacaagttctaagtaacagatacaagtgcatgatgtatagtgttaaacaaatagagacattgagaccgagtctaacctgcatcttctgtggtgaaacacaagggaggtgtaattctgaagacatttccatagtaaccacccttaccaataagtactcctagttctgtagtaattcagaatgaccggttagtaataatatagaagataactatagctaggatcaaaatatgtgtctagactagagggatatggatattacctttcatttggtccattacatgcaatgtttcattttttgctggagttgtaagttcacgatcagtgacaagttcaactcctagcatcaggcctctttctctgacatcacca

SEQ ID NO: 13752 - DNA, 315 bp, Glycine max
  unsure at all n locations
tctgctgaccaccatacaaacctttgcccttccatgcagcaacctggagcaattgagcagcctgaagcttatgctgcaaatatgtacaatatacctcctcaacctcagtagctaaaccaaccacagcagaacaattatgaccttgtcagcaacagatacaaccctggatggaggaatcaccctaacctcagatggtccagccctcagcaacaacaatagcagcctgctccttccttccnaaatgctgctggcccaagcagaccatacattcttccaccaatccaacaacagcaacaaccccagaaacagtcaaca

SEQ ID NO: 13753 - DNA, 450 bp, Glycine max
  unsure at all n locations
tctncacttgtatcttgngcctaaattcaaanagtatggttatcactngnngaagagcttccttggccttctttgttctagcccttgtcatacgtcctccaagttcttctaaaggttccttgcccttagtccttaccatgtcctcatcactctctccctcttcaaaaggatttatgctcaaatcggcttctccatctgcatcaaaaagagttaattcaaacacattaaatgtagtactcacattatactcaccgggcaattcaatcttgaatgcattgtcatttaccctttcaagtacttgaaatggaccatcccctcttggttgaagcttggattactttgctccagaaacctctcctttctcatgtgaacccaaacccaatctccgggttggaaaaataaccttttgcgcccctttgttgcttgctagcatagctctcattcctcttt

SEQ ID NO: 13754 - DNA, 188 bp, Glycine max
cgcctgaattgtaccatggcgtgcatagttatgaccatttgaatatatcgagagctctcgttgttcaattccgagcgtctctatatatgatgcgcctggatctgacctccgggtggaacgctatgaccatttgaatttctccagagcttccattgttcaagttcgagcgtctctatatattgtgcgcc

SEQ ID NO: 13755 - DNA, 467 bp, Glycine max
  unsure at all n locations
agctntgtagcagatgccactctactcatagtttttgaaagatatgttgtcaaagaagcacaaatacattcactatgagaatatcattgtggaatgcactgtagcgctgcgatacaaaagatccttccaccaagacacaaggaccctataagtgtgactattccttgttcaataggtgaagtcacatagagaaaggctctcattgactngngagccaatatcaacttaattccactctccatgtgtagaacggtgagagagttggaaatcatgcccaccataatgactttacagcttgctgatcgatccatcacaaggtcttacagggtaattgaagacgttctgataagagttaagcatatggtctctccagctgacttcgtggtcatggatatggaggaagaccatgacgttcccatcattgtaggatggcccttatgttaactgcaagttgagtagttgacatg

SEQ ID NO: 13756 - DNA, 360 bp, Glycine max
  unsure at all n locations
taatatattttgggtttatattaatatactgccattttnntttttctttataattcgagcttttatttgtgatttgtattttggtaacaaagcaaatatnttaagtctattaccatagatccattatatgttgaaatgtcagggagagttgaaaactcattcaatataaacttacgaagacaatattcataataaataaactatctattaatacgataatactttttaatcacatatcatatcttaatttgaataaagaagatatgaaacatattaataattaccatcttagtgtaacaataacataaaaatatattaacacaaatccattttctggattactcggagaagtaagccttg

SEQ ID NO: 13757 - DNA, 408 bp, Glycine max
  unsure at all n locations
tgaacctgctaatcaaaagcccttcttctgagcccaaaatcatttctttaatttatctgatattttggaaacacgtcaatttctgaaatatatactttatgaaaaacgattcttaaaattaattagattgatctcaataatgcagattttaatctaatgccctttgtttgagtttatcttttaaatattaaaagatatgtttaaaaaatgttgcaataattgtgattaatataaataacttaaaagacgtctccaatgctttttccatatttgataacgcacatttaaaatagtttgtaacaaagctgcataaagaaatacttaattnttaataataaataaacaagcagatctcanatctatcagcgactggtatagacatcatacataaagagcagacatactatg

SEQ ID NO: 13758 - DNA, 364 bp, Glycine max
  unsure at all n locations
tcaagagatcatccnctggacaacattattggtgatatctctaaaggggtaacaactagacattctcttaaagatttatgctataatatggcttttgtatctatgattgaacctaaaaatataaaagaagccatagtagatgataactggatcattgccatgcaagaagaactgaaccaatttgaaagaaacaatgtgtggaaattagtagaaaaacctgaaaattatcctgtcatatggacaaaatgggtttttagaaataaattagatgaacatggtataattattagaaataaagccaggttagtagcaaaagggtataatcaagaagaaggaagagattatgaagaaacatatgctcctg

SEQ ID NO: 13759 - DNA, 422 bp, Glycine max
agcttgcacatcttctcgatcaggttgacaatttaaatctaattgtcccttggcagcttcagccaccgcatggttgtgactccttgaatccaattcattttgcacccgtacctcattctccaatctgtcaactggagttaaatgtcgtaaggtgctatctacttctgattcatctttggtccgccatgataactgatttctctgagcaatctctgcttcacgttcggattgccgcttcttctttcgcatcatcacggttgtaaaccgacgtttaactgtcatgcacacattgcaggtgcatgtgggtttgtgtttgcccttcccacttggtggctggatacagacaatgcaagagcacccacgtctatgccgaggatgttttgtggtgctaacaactgatgtcctgccagagtcacttgcat

SEQ ID NO: 13760 - DNA, 429 bp, Glycine max
  unsure at all n locations
agctagacatctgatgtgtggacatcttgtacttctgaagttatatttcattaactgcgcattatgttgatgcaaattggaagttgaatagtaaaatggttaatttttcttattttcctcctccacactaggggcgtgagatggctaaagttatatatggtttttttggaagaatgggggattgagcanaaaatattttcattaactctagatgatgcttcttccaatgataaaatgcaagactatttgaaggaaagacttttgcatactaatggtttagtaagtggtggtgaattttttcatatctgatgttgtgctcacattttanaccttaaatgtcaagaggagtgaaagtagtcggtcctgcttgtaaaaaaattagtgaaagcattaagtatgttaagggatcagagggagaatgaaagtttt

SEQ ID NO: 13761 - DNA, 477 bp, Glycine max
  unsure at all n locations
gcttaagaataatggcctcagcaaacttcttattcccagaaggaaactctataaataggcctcctaattttaatggagagggttaccactactggaaaacccgaatgcaaaatttcattgaggcaatagacttaaacatttatgaagccataaaagttggaccttatgtacccaccatggtggctggtaatacaacaattgagaaacctatagaagagtggtctgaagaagaaagaagattagtgcagtacaatttaaaggctaaaaatatcattacttctgccctaagaatggatgaatattttagggtgtcaaattgtaagagtgctaacgatatgtgggacactctacaagttacacatgagggaacaactgatgttaaaagatctaggataaatactataactcatgagtatgaattatttatgatgaagacaaatgagagtatacaagatgtgcataanagaatcatacata

SEQ ID NO: 13762 - DNA, 343 bp, Glycine max
  unsure at all n locations
agctattctaatgaaacaagaacaaagtctcttgtgcacgttattgaagntgtgcggctagctacctgttgttatctacttatacggtacaaaggaaaatgaataaattaatgagataataagtgaataataacacatgcctaatggaaaaatttcttttctcaaatctagcacttcatggtagctttctcaataccgatggttggaaattgctgtgcatacgtcacaacataaatgaagatctttgctatctccgattgaaaggtagaagatgattgaattgcggtctatatatccttcagcggtgctgctcgtgctaaaatgtcaacatcgaccacatatt

SEQ ID NO: 13763 - DNA, 402 bp, Glycine max
  unsure at all n locations
ntgagccaagtctttgcaatcctgccctcagttcctcatatgtgattgtaccactattgtcagtgtcgatatttgtgaacattgccttcaagccttggatctcttcttcagaaagattntcagcaatgacctaaaagattatttaaaatccattcagtttatttttgaattggtagaaatatgtacccctaaagttacacagactcaagcaatttagagtcataatgagcactggaaaaatatttatgtctctcaatgtttaattatgccatcaaatacaataagcataaaagagcattgtgatcacttcatgcagctagtggctggactaaccttgagggctagtctttttagattattcattgctctgaatngcttattctggaaagcactgcactgtct

SEQ ID NO: 13764 - DNA, 399 bp, Glycine max
  unsure at all n locations
tactagctcactgattactttgttattgaagaatatgctttctgtatataacacattacccaagaatcattacaaggcgaataagatattatgtcctgtgggtatggaatactagaaaatacatacatgccttaatgattgtaatttgtatagaaatcactttgccaaaatgcgtaactttcctacatgtggggtgtcacactacaaagtgaantttgacaaatgcagtgatacagtctgatcgatgccgcacctgaatcaaataaacattataatgcattaactaggaagtgatcctaggtcgtttcccaacgagcaatgataaactagatggtcataacagataataggaacatagtaacgaattgtggggggattgtttgcttttgtgaattaaac

SEQ ID NO: 13765 - DNA, 494 bp, Glycine max
  unsure at all n locations
cgtgtcacactntcaactgccgaagctaaatatatagccgcatgaagttgttgtgctcaaagtctctagatgaagcaacaactacaagactttagagtaaaccttgatcacattcctctaaaatgggacaacacaagtgttatcaatctaaccaaaaaccctgtcatgcattttatgactaagcacatagaaattatgcatattaaatgcatcaagcatagaataacattctgtttgtacaagtatgtgattcacattgctattcatatcattttttttgtttagtttgtgtcttagttattgatttatgtgcatactcattagtttgtttgaatatcacatgtatttcttagtaatttcgtgatttctctgtgttctaatagattatgctcggttctaatcaactattgtatgatatctgtttggtaagttttcaaaaccttctattttaatcaatacaccatgatttaatcgattacgatngcttaatgtgt

SEQ ID NO: 13766 - DNA, 404 bp, Glycine max
agcttaacatatcatcagcatctcttggaatttatattgctttgctgtggctccgtccaataccacttcatctcatttccaaacacagcccagttaaaatgctttacaatgaagttaacatagtccttgtcgttaatgatcgttctgctgatgcatgctccaattgggaaatcattatgcgtttgtataacttttaccgatgtgttagcatagctgccagagtccagtccatagaatttcaggataacttcacgtttacgaatctgcaacccagcatgtcagtataaattaaaatatataaaaataatgcgaatcatctcatattccatcaatgaagaatggatcatgttatattaagacaaggcactatagtctgaaacatactcagctttatgtaccattta

SEQ ID NO: 13767 - DNA, 429 bp, Glycine max
  unsure at all n locations
gctngaatcttctaccgcatttctgacagcctatgggtgtgtccagtttaagcggttcctaagaatacatgcctcacagtgattaagaatgagaagaatgagcttatccccacaagagtgcagaacagctggcgagtctgcattggttataggaggctgaaccacgtgaccagaaaatatcattttcccctgccattcattgatcaaatgcttgagcgcttggcaagaagtctcattactattttcttgatggtttttctggttatttacaaattcatattgctcctgaggatcaagaaaagaccatattcacctgttcctttagcactttttcctataagaggatgccctttggtctatgcaacgcccctgataccttctagtgatgtatgcttagcattttcagtgattttttagagaggtgcatat

SEQ ID NO: 13768 - DNA, 391 bp, Glycine max
tctgtagggttaaagtctcatgattgtcacatgctcatgcttcttttgttagccgtggctatacaagacatcttgccatacaaagtcaggttagccataactcgcctgtgcttattcttccatgctatatgtagcaaagtcattgatcctgtcaagtttgataagctggaaaatgaagccgcaattatgctgtgccagttggagatgtattttccccctgctttcttagacatcatgattcacttgattgcgcatctggtcagagaaatcaaatgttgtggtcctgtctatctatggtggatgtacccggttgggagatacatgaagatcttataaggctatacaaagaatctatatcatccacaagcatctattgttgagaggtacattg

SEQ ID NO: 13769 - DNA, 327 bp, Glycine max
tataatatatcgtcgcgctcgaaattgaacaacgaaaggtcttgtgatattcacatggtcataactattaactcggatgtccaattcatgcgcattatatataaagacgctaacaaatgcacatcggaagctctccacataggaaaatgcgtcatcagtcttcacactgaggtccgattcacgcttataatatatcgacgcactccaaatcgaacaacggaagctcttgagaaattcaaaaggtcataacctctatctctgatgtgcgattcatgcgcataatatgtcgatatgatggaaactgtactacggaagctctcgacaaat

SEQ ID NO: 13770 - DNA, 412 bp, Glycine max
  unsure at all n locations
tgtatactaacatggataaatgtgtgttctatttggaccatgttgttttccttggntttgttgttatctcacagggagtacaggttgatcaagaaaaggtgaaagccattcaagaatggccaacccccataactattagtgaggtaagaagctttcatggttaacaagttgctacacgagatttgttatggaatttagtactatggaagcacctcttactaagatttccaagaaaaatgtaggatttaaatggggggaaaaacaagaacatgcattcgctgcactcaaagaaaaattgatgcatgcaccaattcctacattacctaattntggcagattctttgaaatcgagtgtgatgcatctggcgttgggatatgggttgtttaatgcaagaggacatcccatacctac

SEQ ID NO: 13771 - DNA, 466 bp, Glycine max
  unsure at all n locations
tctaaactntatacaagaatgaagctctgataccacttgttagacattaagatattacaaactatntccccaattaaaattctattttaatttcaatgcangttacaagttcccttaaaaatgaactattaaataattattcaaataaaacaatctgaatataaatgcaaagcaataataaataaaagagtttaaggaaagagaaagtgcaaactcagatttatactggttcgaccacacccttgtgcctacgtccagtccccaagcaacccgcttgagagtgtcactatcttgtaaaatccgtttacaagttctgatcacacaaggacaatccgttctttgtgttcagatttctttacaacaagagaccctcagtctctctatctctttngacgaattagaaagatgagaagaataaatctctcttgaatagatagaatgacaatttgacactcattaattccta

SEQ ID NO: 13772 - DNA, 371 bp, Glycine max
  unsure at all n locations
tgtaggctacatttacaaccatacattggctgtgaacaccatgaggaaattcacacaaaanactgaattggtgagacatggagttacaagatttgctaccactttcttaactttgcaaagattgcataagcaaaaggccaatcttagaaggttgtttacttcagatgaatggttgaagtctaaggtagctaaagagcccacagggaagcaagcaacagatgttattcttattccatcattttggaatgatgttgtttatgctttaaaagctatgaggcctcttgtaagtgtgttgaggctggtggataatgaaaagaaacctgcaatgggtttcatttatgaagcaatggatagggccaaaaaagcaattc

SEQ ID NO: 13773 - DNA, 389 bp, Glycine max
agcttcaaacctcttacaagggagcagatctggtcaagatggtacatcttcaaactttacatatgaaagaaggtgaagtcatctccgaatgaagaagaagagagtagtcacaataattactcaagacgcaagttaattcgatcaacaaagaaagtagtcacaataatagaagccaacgaaggcgaggtcgtgatggagatcgatgaagaggacaaggtcatggacaaggaaaaggatgaggttggaggccttatgacgataactacaacttccaaagaggttatgggcaaggcaactgaagatcgaggtatcacaagtcaaatgtgaaatgttacaattgtgagaagtttgattattatgcttctgaatctagagcccttagcaacaat

SEQ ID NO: 13774 - DNA, 368 bp, Glycine max
  unsure at all n locations
acgagcaataacttttactctggtgtcctattgtattcagtaatatatcgagacactngaaatagaaaacgaaaacttgtatcaagtgcataccacaatcacatttaacttgtcgcgaaatatgttgagatgctcgaaatttgaaaagaaatttcatagcaaattcaaacgacaataactctttacacggatgttcgattgagtcccgtaatatatcgagatgctccaaattgataacggatgctcgaatcatattcaaacgactataactctctacacggatgtctgattgagttccgcaatatatcgagacgctccaaattgaaacggaagctcctaacaattcaacgaccatacttttactcgat

SEQ ID NO: 13775 - DNA, 319 bp, Glycine max
agcttccattttcaatttggagcgtctcgatatattacggtttgtcttccggacatccgcgcataaagatattgtcttttcaatttgctcatagcttcagagctaaatattgagcgtctctaaatattacaggactcaataagacatctgagtaaagagttattgtagattgaatgtgctacgagcttccgctttcaacttggagcgtctcgatatataacgggactcaatcggacatacgcgtataaagttatatgtcgtttgaatttgctacgagcttcaagtatcaatttggagagtctcgatatatttcgggact

SEQ ID NO: 13776 - DNA, 475 bp, Glycine max
  unsure at all n locations
agctagccgccagtagtaatggcggattgcatgttaattacatacccccaccggaatttgttttgaaacggaccctctttcgtaaattgtttttaaaaggaaccccatacagtaaatttgccaagaaattagtgttgtacccataaaataattttttaaaatgaataaaaatgttataagagataaaaaaaattgatattaattatatcattctattttttaattttatagtatcgacaatgagaaaattatataatatttttgaaaatatataaatgcgtaaagaataattataatttgtaataatataagtattttgaatttctttatcatgagattatatatcttataacaaattataataatcttcttctataaaaaaatttatatatatctgtactgaattcagcaaagcataatatttagaaaacaaataanatagtatctaatatatttatttcaagtttttcaaaag

SEQ ID NO: 13777 - DNA, 344 bp, Glycine max
  unsure at all n locations
ntgagccaattcaaacgacaataactntntactcggatatctgattgagtcccgtaatataacgagacgctcgaaattgaatgttgaagctcttagcaaattcaaacgacaataagtatttactcagatatcttattgtgtcccgtcatatatcgagacactcgaaattgaatgttgaagctctgagccaattcacacgacaataactttttactcggatgtctgattgagtcccgtaatatattgagacgctcgaaattgaatgttgaatctctgagcaaattcaaacgacaatagctttttactctgatgtctgattgagtcccggaacatatcgagacgct

SEQ ID NO: 13778 - DNA, 419 bp, Glycine max
  unsure at all n locations
agcttcaacattcaatnttgagcgtctcgaatataacgagactcaatcagacatccgagtaaaaagttattgtcgcttgaattggctcagaggttcaacattaaatttcgagcgtctcgctatattacgggactcaatcaaacatccgagtaaaaagatattgtcgtttgaattggctcagggcttcaacattcaattttgagcgtctcgatatatgacgagactcaatcagacatccgagtaaaaagttattgtcgtttgcatttgctcagaggttcaacattcaatttcgagcgtctcgatatgttacgggactcaatcagacatccgagtaaaaagctattgtcggttgaattggctcagagattcaacattcaatttcgagcgtctcgatatattacgggactcaatcagacatc

SEQ ID NO: 13779 - DNA, 420 bp, Glycine max
  unsure at all n locations
agcttctaatatctcccacactntntgaggtgtttcattcttggatggccttgattntctcaaggtccacttggaccccatttctaccaactacaaaccctaagataactatattttctacacaaaaagtacacttctctatatttgcatagagggtgtttttcctaaggactgaaagaacttgtctgagatttcataagtgatcatctaggcttctactgtacactataatatcatcaaaataaacaactacaaatctacctatgaaatcccttaagacatgatgcataagcctcataaaggtgcttggtgcattagtgagcccaaaaggcatcactagccattcatacaaaccaaacttggtattgaaagcggttntccactcatcactccttttcatcctgatttggtgatacctac

SEQ ID NO: 13780 - DNA, 280 bp, Glycine max
  unsure at all n locations
ngctaacccacggnagctcctaatatctcccacactgtatgatgtgggccactcttggatgaccttgatcttctcaaggtccacgagtacctcatttctaccgactactaaccctaagataactatattatctacacatgaggaactcttctctatattgtcatagagagagcttgtcttaaagactgacataacttgcccgagatgtcctaatagagcatctaagctcctactgatcactgaagtatcatcataattatcaactgcacatctacctatg

SEQ ID NO: 13781 - DNA, 368 bp, Glycine max
  unsure at all n locations
tactggtaatgtgtctactatcattggtattatatttttctccgtcattgaggtgccacttgagctgccaggtctctccacctttgggcgtattcttttgaaagattcgtgcccnccttttgcacatgttctgtagttgcatcctatctgaagacattatactgacactgcctaacgaaggcaaccactaggtccttccaagaatggactcgggaaggttccaagttagtgtaccaggtaacagctaccccagtaagactntcttggaaggaatgtataagcaattcctcatcttttgcgtatgcctccatcttctgataatacatctntagatggttcttggggcaagtagtccccttgtacttgtc

SEQ ID NO: 13782 - DNA, 398 bp, Glycine max
  unsure at all n locations
cgtctcacgaatgtcatgtgctcatgcaataattgttagccatggctatacgagacatcttgccaaacaaagtcaggttagacataactctgcctgtgcttttcttccatgctatatgtagcanagtcattgatcttgtgaagtttgatgagctgganaatgaggctgcaattatactgtgccagttggagatatattttccctctgctntctttgacatcatgattcactagattgtgcatctggtcagagaaatcaaatgttgtggacctgtttatctactgtggatgtacctgattgagcgatacatgaagatcttaatatggtatacaataaatttatatgcgttaaagcatctatcgtgaaaggtacatggagaagacgccatgaatttgtta

SEQ ID NO: 13783 - DNA, 241 bp, Glycine max
  unsure at all n locations
taatgtatcagaaaggcataatagaactntaatggatatggctacgaccatgntaatcaatttgactttacccgtatcnttgtggatgtatgccttgaaaattgtcatgtatttgttgaatatggttcctagtaagacagttccaaagacacctttngaactgtggacaaatatgacacctagtataagacacctgcatgtctggggttgtcangtanaaataatgatttataatccacaa

SEQ ID NO: 13784 - DNA, 317 bp, Glycine max
ataggtatacctccttgcatataaacatgtaattttcaaggtctgtgaaatattctgtacaagggttcaaaaggaaaagggttttgcatttcttccatcaaaagtgatcatggaattgagttagagaatgctgagttcatatcattttgtgaaaggaatggcatttcttgcaacttctcttaatctagaacacctcaactgaatggagtaattgatagggaaaataaaactctacatgacatgggtacgaccatgctttgggataacttacttcctaaacacttttgggtagaattagtgatcatagcttgctatga

SEQ ID NO: 13785 - DNA, 347 bp, Glycine max
  unsure at all n locations
agacatggagttacaagatttgctaccactttcttaactttgcaaagattgcataagcaaaaggccaatcttagaaggtgtttacttcagatgaatggttgaagtctaaggtagctaaagagcccaaggggaagcaagcaacagatgttattcttattccatcattttggaatgatgttgtttatgctntaaaagctatgaggcctcttgtaagtgtgttgagggtggtggataatgaaaagaaacctgcaatgggtttcatttatgaagcaatggatagggccaaaaaagcaattcatagagctttcaataacaatgaagggaagtataacgatatccttgcaatc

SEQ ID NO: 13786 - DNA, 352 bp, Glycine max
  unsure at all n locations
gccatgcacgatgtgtctgttntagatgaaagttgtctgcctctcatcaataagaccacatatcacttgtctcactctatttgctaataacttagatatcaccttgtacatacatccaatcaatgagattggtctgtactcatcagatgactgtgggtgttcggttctgggaattacagctatgaaagaagcattactgcctctatggaagctgccctgcacatggaattcatctacaaatcttctgaagtcagttttcatcatttgccaaaattctttaatgaatttcaagtttaagccatcatgtccaagacanttgtgcccatcacaactgcacactgcttctttgatc

SEQ ID NO: 13787 - DNA, 374 bp, Glycine max
  unsure at all n locations
tgacattcaccacatattttgccttcttctatttctaatcgagaatgcctctaacagcaccttcgtcaatgattctcttcatgcctcttaagtgcagatgtccaaatctttgatgccatattntgacttcatcttgtttggagaatagacatgtggaggagtaactggtttcttgaggtgtccatacgtaaacagtggcctttgatctgctgcccttcattaggacttcactcttctcatttggcaccaagcattctgactttgtgaagtttacattgaatccttcatcacacaactgactgatgctaatcaagttcgcagtcagtcccttcaccagcagtactgtgttcagactaagaagtccatcatggact

SEQ ID NO: 13788 - DNA, 415 bp, Glycine max
  unsure at all n locations
aatggcgatgactagtggcacacatgtatgggcgacaacccttatcataagatgaacaaaggagaaggatagcattgtgggggacctccatacagactgagcaggttgcatcttcccaatctttcttctccaatgctttagaagagctcttcctaacattaacatctttcagattttttcttccacaagacaaaagatgtgggcttgccctgtgacctcgagccttgctccgcaacttaccaactntagccatcaacaaactgaacctgaaactgatcaaggaaagacaatcatcatagtagaatcttttaaaaagcagagaaattctagcataatanattanaatgatcattccanacacaatanatcaaatgtctagaattgacatgatatcattatacgacttcgtagtaat

SEQ ID NO: 13789 - DNA, 207 bp, Glycine max
  unsure at all n locations
gtataataaccatgactcacatgcncctcagaaggcgaatcaagacccataatcctatccacgggatgcagaatcccagtgtacacagcgacattagcagaagtacaagaataatgttgaacattaacaccccactcgttgaggtgaagatcaaaagccaacaacgcacgctggctacagagaaactcaatctcatcaatgtattga

SEQ ID NO: 13790 - DNA, 235 bp, Glycine max
  unsure at all n locations
ttcgagcttctcgatatgtgatntgcctgaatcggacattcgtgtgaagagttataccagttgaatttctcaagagctgtctgtgtacaggtttgagcgtctcgatatgtgattagcctgaatcggacatccgtgagaanagttatgaccatttgaatatctctagatcttccgttgctaacttcgagcctctcgacatattatgcgaccgaatctgacattcgtgtgacaagta

SEQ ID NO: 13791 - DNA, 337 bp, Glycine max
  unsure at all n locations
tgtagcanatgcanaccacaatatcttgtagctctgatatccgactgagttccgtaatatatcaagatgnctcgaaatgactacagaagctcttagcanattataacgacaataactntctactcggatgtccgattgggtcacgtaatatatcgagtcgctcgaaactgaatacagaagctaagagcaaattcaaacgacaatgactnttaactcggatgttcgatngagtcccgtaatatatcaagacgctcgaaattgtatacggaagctcgtagcaaattcaaacgacaataaatttgaactcggatgttcgattgagtcccgtaatatatcg

SEQ ID NO: 13792 - DNA, 363 bp, Glycine max
  unsure at all n locations
gaagatggtgtcatccgcanactggagaatattcactgttaccttattcttccctaccanaaagctctgaaataagtttctagacactgcttccctcatcaaacctgttaacccttcagcaaccaagacaaataataaaggggccaagggatccccttgtctcaatcctctntgaggcttaaattcctcagtcggacttccatttacaaggatggatattgaagctgatgaaaggaagcctttaacccaaccaatccacctttcatggaaccccattcttctcatcatataaaataggaattgccaggacacagagtcataagctntntcgaagtccactttanacaccgagcaagatttctt

SEQ ID NO: 13793 - DNA, 365 bp, Glycine max
  unsure at all n locations
tttatgttgtgaaaaattggtcacattttgactttgccttaaagttgtgtatttatttgaattggtgcatttntatttttgtggcatgcttgtgaaggcttgctaagatgtggaaagagctgcagattgagatgggatatatatctgaggccagacctcaagagaggtggatntactgaaatggaagaggatcaaattatacagctacattcatgtctaggtaacaggtatatatgttatatgttctgaattgctttgcacccaaaacacanaaagatggtagattnttggacattatgtgaagaaagccttgaaatcaanggtttaaattgtggtcgtgggttcatcacgatccttaacactac

SEQ ID NO: 13794 - DNA, 434 bp, Glycine max
  unsure at all n locations
attatatannggttannggttatggtacctatagtatgaaaacttttgcattngcatttgcattctaatgtgggttatgtcattccatcatggacaatcttatgtttcactaacatattattcttgacctacatataagcaacaaaaaataaatgatttttaaatataagtaaattttaactatttttatcttatttaatgatattaatataaaaatatctttcaattagttcagtatttattntcaatgaattttttattcataatattaaattccaatgaagagtatattatganaaanaattctaaaataaaaagaattaaatataanatttacagttatttaaatttgtngataaatttgaacgtggagtttcggcctgcanacactatccattactcattagaatcctaatccataatgaataaatatt

SEQ ID NO: 13795 - DNA, 249 bp, Glycine max
  unsure at all n locations
cacccgangaagacactgacananacttatactactagaatggccataatacaaggcttataccctatactactagaatggacataataccaggcccagacaaaggaataacctattctaatatntacaaagataagcgggctcatacttagcccatgggctcgaaatctatcctaaggctcatgagaaccctanggccttnccttggatctctagcccaatctactnggagtcttctatccaatgccc

SEQ ID NO: 13796 - DNA, 403 bp, Glycine max
  unsure at all n locations
cttcactcggatgtccgattccggatcataacatatcgagacgctctanattgagcaacggaagctcttgagaaattcaaatggtcataactttccacatggatgtctgattaagacgcataatatatcaagatgttcgaaattgaacaacgaaagctctcgagaaattcaaatagtcataacttttcactcggaggtccgattcatgcgcataatatatcaggacggtcgaaatngaacaacgaaagttcttgagaaattcaaatgggcataactnttaacccggataaccgatttagaaacatcacatatagagaagctcgaaatgaacaacggaagctctcgagaagttcaaatgggtaaaactnttcaacggaggtcccattcgggcgcataatatatc

SEQ ID NO: 13797 - DNA, 513 bp, Glycine max
  unsure at all n locations
tatgacgttgtacgtcagcgatttgaaggagagacttcttatgatcctgttgtcacattatcaacatttagttatttgaaggaagaaaaatattctacgttttgtatcactatattagtcgtattgatcaatagttgtttatatattntaataaaatgaataacttctcaccttanaaataatttaaattatttntaatatttaattgtacatattaaattaatatgaagaanaaattattanataaaataaatataaaaatttacactaatttaatattactatctatgcacaaatntatttatttttataattagntactgtaaaatatatttctggaaaaattaaattaaattcatgactctaaagttataaaataatataatataatatgaaaattanaaaaatatatcaaacatagatatatatatatatatatatatttagttatgtatatctatatctatatatatatttatatatatatatatatctatatatatatatatatat

SEQ ID NO: 13798 - DNA, 413 bp, Glycine max
  unsure at all n locations
gctctcctttatctcttcctagtgagctatgatagttcttttgttgcaccctagctatcgtgatgagcctatataatataacctatgctatntagtggcaaaaaggatatgagactaaactactggttattaaactntatccctaagtaacaaggattgctagggatttataaaagcataaagctcagaagtgtgccttggtgacttgttggtcatgagttcgaatccggaaacagcctctttgcatatgcaagggtaaggctgcgtacaacatccctcccccataccttcgcatagcaaagagcctccgggcaatggggtacgaagtttataaagctcagaagtaatactgtcccaaaatcttaatttgacagaaaattatccattgatgcaaatcaagatacattaactat

SEQ ID NO: 13799 - DNA, 404 bp, Glycine max
  unsure at all n locations
ctagcgccatatgcttctatttttagtcctttgataaggctaagcgtagctgttgcgctaagcccttgttatgtgttaaggaggttgagctaagcgtgccttgctgcactaagctctgttggatcaagtggcctcggaataattaagaagggggggttgaattaattattaacgaacctttactaattaaaaatctatccttcttaatgttaccaaaagtaaaagcaataataaactgcacaacaaatattaaagagtgtagggaagaagaaacaaacataagagttttatactggttcggcaacaacccgtgcctacatccagtccccaagcgacctgcggtccttgagatttctnttcaaccttgtaaagtcctttacaagcaaagatccacaagggatgta

SEQ ID NO: 13800 - DNA, 324 bp, Glycine max
  unsure at all n locations
gatgttcacatgcaggcagctgcatccgaagctgaattactctataagaatctcacggtcatgaatgagacgtgaatgtatcaaacaaacgaaaccattattgagaagtatggcaatgcactcgatgatgacaaacttccaagagaacttctgctgggccaaagtgacaagcaagatgagtctgatcgtgcangtataattattaagggccatgtaagatatgcattctaaatctttacggtgcagcatatgtatataaatcttaaatattcttcttgagagtgtattggcagtgggatntcatacatgatctagcaacatatt

SEQ ID NO: 13801 - DNA, 251 bp, Glycine max
ctcaactatgcggcaatattacaatagacctcctcgacctcagcagcgatatctaccacagcagaacaattatgacctttccagcaacagatacaaccctggatggatgaatcaccctaacctcagatggtccagccctcagcaacaacaatagcagcctgctcctgtcttccaaaatgctgttggcccaagcagaccatacattcctccaccaatccaacaacatgaacaaccccagaaacagccaacag

SEQ ID NO: 13802 - DNA, 396 bp, Glycine max
  unsure at all n locations
cttcctgagaagcttctntgagaaacttccttgagaagctagagcttagctacactcactcatctaanaactaagctcgcctccttgagaagctagagcttagctacacacacccatctaaaaactaagctcacctccttgacaaaatacatganaatccaaaaaaaaagtccctactacaaagactactcanaatgccctgaaatacaaggctaaaaccctatactactagaatggccaaaatacaaggcccaaaagaaggaaaaacctattctaatatttacaaagaagagtggatccaaccttgacccatgggctcanaaatctaccctaaggctcatgagaaccctanggccttcccttggatctctggcccaatctacttggagtcttcta

SEQ ID NO: 13803 - DNA, 384 bp, Glycine max
  unsure at all n locations
tctggtgggacatctngacttgttttccaatctgacattcaccactgattctgccttcttctantttcagattgtgaatgcctcttacagcacctttgtcaatgattttcttcatgcctcttaagtgcagatgtccaaatctttgatgccatattttgacttcatcttctttggagaatagacatgtggaggagtaactggtttcttgaggtgtccataggtaacagttgtcctctgatctgctgcccttcattaggacttcactcttctcatttgtcaccaagcattctgactntgtgaagtttacattgaatccttcatcacacaactgactgatgctgatcaagttcgcagtcagtcccttcaccagcagtacttttgtca

SEQ ID NO: 13804 - DNA, 193 bp, Glycine max
  unsure at all n locations
atcgagacactcaagagtggaaaacagacgctcacgagaaattcanatgggtataactcttcactcggatgtctgattcacgcgcataatatatcgagaccctcgatattgtacagggaagctctctgccaaatcaaacgaccataacatttgactcgaatgtatcatcgacgcncacgatatttcgagacgc

SEQ ID NO: 13805 - DNA, 248 bp, Glycine max
actattcacacggatgttcgattatggcgaatcacatatcgagacgctaaatattgaacagcggaagctctcgagaatatcaaatggtcattaactttaacactgagttccgattcaggattataatatatacagacgctcgacataaacattggaatgtctcgagaaattcaattggttatcactcttcacacggatgtccgattccggcgtataatatgtctacacgctctatattgaacaaccga

SEQ ID NO: 13806 - DNA, 488 bp, Glycine max
  unsure at all n locations
tgatgtntgtgttgaatgcattaaaggtaaacagaccaaaagcaagaaattaagtgcacatagggctacagacgtcttggaattgatacatatagacatttgtgggccatttcatacaccttcatggaatgatcaacaatattttatatcattcatagatgattactctagatatgctgatgtgatcttgactaggagcggatcgcttgatacaggctacagagaatttggatgacgtcacttccagtgaaggaagataagtcagggtagacgccacaaggattaccttgataagtctgagattggttcaacaaggaacccaaagagaagctctcaccaaattntatgaaaattccaatagtcctttcattgaaaacaaaaaccaatacttatagtgtatctgaacaaaaagataaaaatagacatgggccttcaaaacagtttgggccaaaanaattatatataaaaaaatagaacatatttattat

SEQ ID NO: 13807 - DNA, 437 bp, Glycine max
  unsure at all n locations
agcttagccctagaggggatggaccttntcaggttntggagagggtcaataaaaatgcctataggttggacctcccagatgagtatggaatcaacaccacttttaacatttcttatttaattccttttgcaggtggagctgatattgaggaggaggaactaacagatttgaggtcaaatcctcttcaaggggaagggaatgatgcaatcctccctaggaagggaccagtcactagagccatgagcaagaggctccaacaggattgggttagaactgctgaagaaggccttangattctcatgaacctcaaggtaaatttcttagcccatgagctaaggttgggtccaattatctttgtacatattagactaggatgtcattatatntggtccttgtatttagggctccataatgtaggtagggtaccctagaagtat

SEQ ID NO: 13808 - DNA, 386 bp, Glycine max
  unsure at all n locations
agctnntacaaaaaaccacacttatgccttagtttctctgccacccaagaggaaagttgtgggttgctagtgggttttcataatcaaagaaaatccagatggttcagtcaacaagtataaaacccatttaatggctaaaggctttcatgaagtagttgggtttgattttaatgaaacattttctcctattgtcaagcatgtaactattagaatagttcttgcttttgccatcacttatcagcaggagatttttcaattgggtgttgataatgcattcctcaatgggctacttgaagaggatatctttatgcaacaaccttctggttctgagcatcaaaataagacattagtctgcaaactcaacaaggcactttatggtcttaaac

SEQ ID NO: 13809 - DNA, 450 bp, Glycine max
  unsure at all n locations
agctngccttgccccttgatatatttgagggactcatggtcactatgaatgacaaattccttgtgataaaggtagtgttgccatgttttcaaagcccgtactaaggcatacaactccttatcataagttgaatagttaagggtaggaccacttaacttttcactaaaataagcaattggatggccttcttgcatcaacacagccccaatcccaacatttgaagcatcacactcaatttcaaaagatttttgaaagtttggcaacgcaagtatggggacattagttagcttttgcttaagaacattgaaagcttcttcttgtttctctccccaattgaaaccaacatttttcttgagcacttcattgagaggtgctgccaatgtgctaaaatccttcacaaatcgtctataaaaacttgctaagccatgaaaactcctcacctcggtcaca

SEQ ID NO: 13810 - DNA, 479 bp, Glycine max
  unsure at all n locations
ggcttctacatctntggcaaggcatgtcatcttcctgtatagagcacanagcctactgggctgtaaagacttgcaacttctctatggaccaagctagagaagaaaggaagttgcaactaagtgagctagatgagatccgtttagaagcctatgagaattccaaattctacaaggagaagacaaggaagttccatgacagattcatagctaagaaggactntgtggttggacaaaaagttttattgtataactctaggctcggactcatgagtggtaagttaaggtcaaagtggattggtccttttgtggtgactaatgtttttccttatggtacagctgagatcaaaagtgaatccacagatacaagcttcaaggtcaatggacaccaactgaaaccattcctcacaaatccctccttagtggatgtagtggtggaggagacctccttacttcaccctacttctttctcaccatgactc

SEQ ID NO: 13811 - DNA, 502 bp, Glycine max
  unsure at all n locations
ngaatcatgcagccactnntgctttcaatccactgcttaaatatccaaaatacacctgcaacttctgacttagacttgagaaagtaaatccaacacattctagtgaaatcatctataaagatgatgtaatatttactttttttaagcaaagtagtcctttgaggttcggccaaatctgtgtgaatcaattgcagcttctctgttgctctccaggttgattgtttgaagggtaatcttgcttgcttgccatattggaatgcttgacaacatggtaatttagaatctaagtgaggtaagccatgaaccaactcctttcgtttcatgttcaacacagttgcatgatgaaaatggtctaatcttttgtgccaagcttctgtactatttacagtagctggataggctgcttgctcctacttcagtgggttaaatgagaaaattttgcctctcactttgatactgaaaatttccttgtcattgacatctttaatcaaacagtgcttat

SEQ ID NO: 13812 - DNA, 345 bp, Glycine max
  unsure at all n locations
gctgacttccttnagtagggaatctatccttcctaagatggagccaaacccagtcaccctcattaagaattagctcttttcttcctctattgcctttagttgaatacacctttttttggttctctatatagttcttaaccctctcatgtaacttctttataaactctaaccttgattccccttctttatgtataaaagaagtgtcaagtgggaggggaatgaggtctaacagtgttaggggattaaacctatagacaacctcaaaagggtactgcttgtgtggtctatgaacccccgtgttataggcaaattctacatgaggaagatactcatcccaagacttac

SEQ ID NO: 13813 - DNA, 447 bp, Glycine max
acggaagttctaagacaagtcagacgacaataacgactgactcggatgtacgatatagtatcgtaatatatcgagacgctcgtaattgaaaacagaagctctgagcacatttaaacgacaataacttttgactcggatgtccgattgtgtcccataggatatcgagacgctcgtaattgaaaacggaagctctgagagaaatcaaatgacaataacttttaactcggatgtccgattgagccttgtaatatatcgagacgctcgagattgtaaacggaagctctaagaaaagtcaaacgacaataacttttgactcggatgtccgatatagtctcgtaatatatcgagacgctcgtaattgaaaatagaagctctgagcaaattcaaacgacacataactttgactcggatgtccgattgtgtcccgtatgatatcgagacactcgt

SEQ ID NO: 13814 - DNA, 344 bp, Glycine max
  unsure at all n locations
agcttctgttntcacttacgagcgtctccatatattacgggactcaatcggacatccgagttaaaagttattgtcttttgacttttcttagaacttccgttttcaattatgagcgtctcgatatattaataggctcaataggacatccgagttaaaacttattgtcgtttgattgttctctgaggatgcgttttcaattacgagcgtctcgatatgctacgggactcaattggacatccgagtgagaagttattgtcggtcgaattctctataacatctgtgttcattacgagcatctcgatatattatgggactcaatcggacattcgagttaaaagttattg

SEQ ID NO: 13815 - DNA, 455 bp, Glycine max
  unsure at all n locations
tattgcaagaagagatggatagcagaagactttatgtaggtgagtattggaaaattgcaaggagaaatgaatcccttctacctcaaaaatcaagaagtaggtggataaaggaaggtgatggtaatacaaagttttttcgtggtgtcataaattggaagagaaggaagaacaacatcaaagggatttccatcaaaggaagatgggaggaggaaccaagacttgtgaagaaagaggtgttggaattttatcaaaaaatattctatcaagaagcatggatgaaaccatgacttgatggcatgtccttcanacacttgngggttggtgacaatgattcactttgttgttgttttaatgaatgggagataaaanaggcaatgtggaattgtgaaggtgataaaagtcatggtcccgatgggctcaattataatcttataaagagatattangacactatg

SEQ ID NO: 13816 - DNA, 430 bp, Glycine max
  unsure at all n locations
agcttccattgttcaatttcgagtgtctcgatatattatgcgcctgaatcggacctccgaatgaaaagttatgaccatttgaatttctcgagagctacctttgttcaatttcgagcgtctcgatatattatgcgcctgaatcggacccccgagtgaaaagatatgaccattggaatttctcgagagcttccgttgttcaatntcgagagtcttgatatattatgcgcatgaatctgacctccgagttaaaagttatgaccagttgaatttctcgagagcttccgttgttcaatttcgagcgtctcgatatattatgcgcctgaatcggacctccgagtgaaaagttatgaccatttgaatttctcgagagcttccgctgttcaatttcgagcgtctcgatatattatgcgcctgaatcggacctccgagt

SEQ ID NO: 13817 - DNA, 435 bp, Glycine max
  unsure at all n locations
agctntcncgctctatgatcttatgtggcttcctctcaaactcgccatacgaggtcgccaggttgaaaggctcatgattgaacctttatattgtatcttttggttggcaacttcttctctaatccttgtcatttcttggactttatcaatgatttcaagttccaccctcatattttcttcatttttttgttgctgaaataatagtctctatgtcgatgataccccaccttctatggggatcatggtgtctgtgccatatgtaagttggtaatgagtttcattggtggctgtttagggtgtacaatggcacgcctagagtatgttgtagagttcttctttccataagcctttagacttgtcaagtctagtacgcagggccctgagaatgactcgattagttgcctctgcatgtccgttattctaaggatgttcaac

SEQ ID NO: 13818 - DNA, 489 bp, Glycine max
  unsure at all n locations
agcttctgttttcaattacgagcgtctccatatattacggttctcaatccgacatcggagtaaatagttattgtcgttagaatttgctcacagcttctgttctgaattttgagagtctcgatatactacggaacacaatcggacatctcagtaaatagttattgtcgtttgaatttgctcagagcttctgttcttaattacgagagtctcgatatattacgggattcattcggacatccaagtaaaaagttattgccgtttgaatttgctcaaagcattcgttgtcaattacgagcgtctagatatattacgggattcattcggacatccgagtaaaaagttattgtctttttattctgctcatagcttctgtttcaatttcgagcatcttgatatattacaggactcaatcggacatccgagtcataagttattgtcgnttgaattngctatgagctatcggtttccttacgagcatctaatatgcta

SEQ ID NO: 13819 - DNA, 499 bp, Glycine max
  unsure at all n locations
ntactatgcagagaatatccaagggaaataccttcatctgacttagcatcaaatnttcctaagttatcttttccattattcaatacaaaacatttacaaccaaagatatgaagatgtgagatgtttggttttctgccattgaacaattcatatggagttttctttaaaatgggtcttattaaagccctatttaaaatgtagcatgcagtgttaatggcttcagcccaaaagtattttggaaaaggagtatcatttaataaagttctagcaatctcttccaaagatctatttttcctttcaacaacaccattttgttgaggggttcttggtgcagaanagttatgctcaatcccatgcttatcacaaaataattcagatttnttattttcaaactcacccncatgatcactcataatagatataatcattagattnttcttattttgaatgagttttgcaagtnttctaaatgcttgaaatgcatcattcttatgagtga

SEQ ID NO: 13820 - DNA, 450 bp, Glycine max
  unsure at all n locations
agcttgtggatggtgaccaatcccagaggacttttgtgtatattaaggatgctattgaagttgtcttattgatgattgtaggttcccatatccaatctttttatacaactttatatattttaagttctgattttctgattgtagaatttcatctttaaactattactcttgttggatggttcaactaaatgtgaacgataatttttaacaggaaaatcccgccagggccaatggacatatttttaatgtgggaaacccaaacaatgaggttatagttaggcagcttgctgaaatgatgactcangttagaggattaagtttgattgtttgatcctattagaatttcaacatggtatttgggaccattcaacatttattttcgttcaattctgcaggtntattcaaaggtaagtggagaagcacctctggaataaacctatattgatgtga

SEQ ID NO: 13821 - DNA, 489 bp, Glycine max
tcaggttgcttaattgctccaggttgctgcatggaagggcaaaggtctgtatggtggtcagcagaggagcacaaaccacaaacccttgcgacaggtacagatttctgattcaaggccagctgggttaccaagttgaccaacgcatccagtttgccttcaagcttcttagtttcagatgatgcagatgggtttgtagctacctcatgcactcctctaatgactatggcatcatttctggcgctaaactgctgggagttggaggccatcttctcaattaaatttctggcttcaacaggggtcatgtctccaagggctccaccactggcagcatctatcatacttctctccatattactgagtccttcataaaaatattggagaagaagctgttctgaaatctgatggtgggggcaactggcacatagtttcttaaatctctcccagtactcatacaggctctctccactgagttgtctaatacctgagata

SEQ ID NO: 13822 - DNA, 419 bp, Glycine max
  unsure at all n locations
agcttctatattgcatgtcctagttggccctgacttctccgttttnttttaattgtggattacagaatttggatagggcaattgaccacaaggcattgcatgataccttttctacatttggaaatatcctttcgtgcaaggtagctacggattcatctgggcaatcaaaaggctatggctttgttcaatttgataatgaggaatctgcccaaaaagctataaagaagctgaatggtatgctgttgaatgataaacaagtgtacgtgggacccttccttcgcaagcaagagagagaaagtgctgctgacaaggcaaaattcaacaatgtttttgtgaagaatctatcagaatcaaccaccgatgatgagttgaagaacacttntggttgaattggaactattactagtgctgtagtaatg

SEQ ID NO: 13823 - DNA, 322 bp, Glycine max
  unsure at all n locations
agctngtcttcaacatataaatcaaaatctattttctgatcttctatgcccagctacagcttctttctccccatatcaactatgcagctagcagctaacatgaatggcctccccaatattaccggaatgtcattatcttcacagatatccattaccatatagtctgtcgggaaaataaaactgttcactctgaccagcacatctncaattactccatatggtctggtgatggagcggtcaacaagttgtaaagtcattctagtgggcatgatctccaactctcccaaccttttgcacatggagagtggaattagttaatact

SEQ ID NO: 13824 - DNA, 408 bp, Glycine max
  unsure at all n locations
ctaagcttcaactngcacanaggagttgagcaggtaaaaaagattcgtcttcaaactcttagaggtgactttgagcgtttgtttatggaggagtccgagtcaatttctgattatttttctcgagtattggccgtagtcaatcaacttaaaagaaatggtgaagatgttgatgaggtgaaggtcatggaaaaaatacttcgaactttaaatccaagttttgacttcattgttaccaacattgaagaaaacaaggatttaaagaccatgactattgagcaactcatgggttccttacaagcatacgaagaataacaaaaaagaanaattaaacaaaatgaggctacggagcaactactacaactcaacgtaaaggaagcaaactatgcaaattacaagagccaaagagga

SEQ ID NO: 13825 - DNA, 463 bp, Glycine max
  unsure at all n locations
ntacaacanatgccactntactccaagttntaaaaggatatgttaacaaggacacacaagtatattcaccaggaaaacattgttgtggaaggaaattgtagtgttgtgattcaaaagatccttccacccaagcataaagaccctgtgagtgtaaccattccttgttcaattggagaagtcactatggaaaggcacttattgatctgggagctagtattaccataatgccactctccatgtgcagaaggttgggagagttggagatcatgcccactatgatgactttacaacttgttgaccgctctattaccagaccatatggagtaactgaagatgtgctggtcagagtaaaatattntatcttcctggcagactntgtggtaatggatatctgtgaagataatgacattcatgtaatattgtgaaggccattcatgttaactgcaagctgcatagttgatat

SEQ ID NO: 13826 - DNA, 497 bp, Glycine max
  unsure at all n locations
aatttcgagcgtntcgttatattacgggactcaatcagacatccgagtaaaaagttattgtcgtatgaattggcttaaagcttaaacattaaactttgagcgtctcgatatattactggactcaatcagacattcgagtaaaaagttattgtcgtttgaattggctcagaggttgaacattcaatttcgagcgtctcgatatattatgggactcaatcagacatccgagtaaaaagttattgtcgtatgaattggcttatagcttaaacattcaactttgagcgtctcgatatattacgggactcaatcagacatccgagtaaaaagttattgccgtttgaattggctcagaggttcaacattcaatttcgagcgtctcgatatattacgggactcaatcagacatccgagtaaaaagttattgtcgtttgaatnggctcataggttcaacattcaatttcgagcgtctcgatatattactggactcaatcagacat

SEQ ID NO: 13827 - DNA, 398 bp, Glycine max
  unsure at all n locations
canattcaaacgaacaataacttttatctcggatgtctgattgagtccagtaatatatcgagacgctcgaaattgaatgttgaaactctgagccaattcaaacgacaataactttatactcggatgtccgattgagtgacgtaatatatcgagacgctcgaaattgaatgttgaacctctgagccaattcaaacgacaataactttttactcggatgattgattgagtgccgtaatatatcgagacgctcgaaattgaatgttgaacctctgagccaattcaaacgacaataacttgttactcggatgtctgattgagttccgtcatatatcgagacgctcaaaatngaatgttgaagctctgagccaattcaaacgacaataactttntactcggat

SEQ ID NO: 13828 - DNA, 422 bp, Glycine max
  unsure at all n locations
ccctgagagatntagtgaacatgtcctccagttggtcactagagttgacaaactcaatggtgatttttcctgagagcactttctctctcacaaaatgacagtcttctactgtgtttagtccattcatggaagaccggattagatacaatgtggagaacggcttgattatcgcaaataagattggtggcttgagtgtctccaaattggaactgctggagaagtttccttagccatgtaatttcacttgtagttgcaggcatggcacggtattcagcttcagcactggatctagtgactatattttgtttcttgcttccccatgggatcaaatttcctcatataagaacacaataaccaatcatggacttcgtggctgatggtgagtctgcctaatcagcatcagagtaaaacanatgatcttg

SEQ ID NO: 13829 - DNA, 495 bp, Glycine max
  unsure at all n locations
tactactctntcgtcttgttagggtgttcacaactcattgtgtctcattaacccagtttgtttcaaggttaattntgatgcgttcagggttaaaattagactctgtattttttaagatagatttgagttatgttttgagtcatctcaacatgcatgagttgatgtcttatttttgtttaaaaagtattgaattttaaataattgtacatcaataataaaaaaaaatattgatagataatattttgtgtacataatattatatttaattatgatgattntatttaatatataatatacattgtaaaatatattttaacttttttaaccaatatgttagttcgagtcgtgtcgagcaaactagtttgttatataacaaaatatgagaatttgagagtaggttttgaagaaataagtacaagattactctgaagtnttaccttaaaatattattttatccaagtacatgaanaggaaaagttgtactcctataagtct

SEQ ID NO: 13830 - DNA, 425 bp, Glycine max
  unsure at all n locations
tatgttgcatatattacaatagacctcctcaactctcagcatctnaatcatccacaacagaacaattatgacctttccagcaacagatacaaccctggatggaggaatcaccctaacctcagatggtccagccctcagcaacaacagcagactgctccttccttccaaaatgctgctggcccaagcagaccatacatatcttcaccaatccaacaacagcaacaaccccagaaacaaccaacagttgaggcccctccacaacctatcctcgatgaacttgtgaggcaaatgactatgcagaacatgcagttacatcatgagaccatagcctccattcagagcttaaccaatcagatgggacaattagctacccaatngaatcaacaacagtcccataattctgacaagctgccttctcaagctgt

SEQ ID NO: 13831 - DNA, 383 bp, Glycine max
tgctcattacttttcactcagaagtccgattcatgcgcatcacatatagagacgctcgaaattgaataacggaagctctcgagatattcaaatggtcataacttttcactcggaggtccgatttatgcgcatcacatatagagacgctcgcaattgaacaacggaagctctcgagatattaaatgggcctaccctttaactcggaagtgccaatcatgcacattaaataccgagacgctcgtaattgaacaaaggaaggccttgagcaattcaaatgggcttaacttttcactcggaggtgcgaatcaagcgcattacatatagagacgcctgcaattgaaccacggaagctctcgagatattcaaatggtcataacttttaa

SEQ ID NO: 13832 - DNA, 467 bp, Glycine max
  unsure at all n locations
atatattcaatatattntatatgttntatttatgttcatgtttatattttgataaatgaataattctaggtagtataagtcaatatatttgatatcttttatttatgtacatgtttatattttgataaatgaataattttaggtagtataagataataattttgtatagggctctttgtattgttaatgttatatatgctagattatattttgataaataaatagttctaggtagtataagattatagtttgaattgttaatgttatatggtagattagatttaggtttatatgataaattangaatacttttacatactctaagttattaattttatatggtagattaggaatatttttaattatgatatggtagattaagtttagttggaaatttccttataatagattagaaataattatagattagctttagtctaaatgttgtatatggtagaatacattta

SEQ ID NO: 13833 - DNA, 425 bp, Glycine max
  unsure at all n locations
ctgatagcgatgccattttanaaccagccaaacactcctgttggacctgatctcaaatggagatacttttggaggatcggtcctcgaccgtcaaatactcgttttcaggtctcatgctttctcttttttcttatccgtaagacatttgtcctagttcttaaacctaatgtttattataaatgtacaggaacttaatgctgagccagtaatacctgaaggtttccctgaatggaaagaaactatggattcctgnggatacaaaatgatagcagcaattgaagtcagtcattntttttcatgctatttctaatgtgtggtgatctaaatgtgcatatttgttcttaggtggttgctgaaatggcagctattgggtttggtcttccaaaggatgcattcacttctcttatgaagctggtgagcacatc

SEQ ID NO: 13834 - DNA, 445 bp, Glycine max
  unsure at all n locations
agcttatgctgcanatatttacaatagacctctctaacctcagcagcaaaatcaaccaaagcagaacaattatgacctttccagcaacagatacaaccctggatggaggaatcaccctaacctcagatggtccagccctcagcaacaacagcagcctgctccttccttccaaaatgctgctggcccaagcaaaccatacattcctccaccaatccaacaacagcaacaaccccagaaacagccaacagttgaggcccctccacaaccttccctcgaagaacttgtgaggcaaatgactatgcagaacatgcagtttcagcaagagaccagagcctccattcagagcttaaccaatcagatgggacaattagctacccaatngaatcaacaacagtcctagaattctgacaagctgccttctcaagctgtccanaaatccaaaaat

SEQ ID NO: 13835 - DNA, 493 bp, Glycine max
  unsure at all n locations
ggatgcctcctaccactgtttatgatgcaatgaagctgagttatgatgatctagatcgtaaagagcaacaactttttctagatctagcatgtttctttcttagatcacatataatagtaaacgtgagcaatgtaaaatctttattgaaagatggtgaaagtgataattcagtggttgttgggttggaaaggttgaaagataaagctcttataactatctccgaggataattgtatatctatgcatgattgtttacaagaaatggcctgngagattgttcgtcgcgaagaccctgaaagtcgtagttggttgtgggatccaaatgatgacatttatgaagcattggaaaatgacaaggttaaataccagctacatataacaatttttgaatcacgttagaatttgttttttgcaagaaaaattggctttgatgattaatattttgcttctacattgatgcagtgtactgaggccattataagcatacgaattca

SEQ ID NO: 13836 - DNA, 460 bp, Glycine max
  unsure at all n locations
tgtcactctactcataatttctgaaagatatgttgaggaggaaaaacagatacatccaccaggagaatattgctggggaagacaactgcaatgctgtaatatagagaattcttccaccaaaacagaaggaccctggaagtgttactattcattgttcaatcggtgaagtcactgtgggaaaggctctcattgatttgggagccagtatcaacctaataccgctctccgtgtgtaaaaggttgggagagttggaaatcatgtccacgagaatgactttacaacttgctgatcgatccatcacaagacctcacagggtaattgaggatgttctgataagagtgaaacatatggtctttccagctgattatgtggtcatggatgtggaggaagtcattntgggatgtccctttatgtcaactgcaagctgcataattgatacnggaagaaagacactggagat

SEQ ID NO: 13837 - DNA, 441 bp, Glycine max
tatgaagagttcttgacgatgctagttgtcaagcaccttgtgacttctgtcgaatatccctagaccaacaatcaggagaaggcagcaaacagagttatccttaaggccttgcgcacaagacatgacaagcccaagggtctatggaaggaggaactccccagcatactttgggcttatcattgttcgcctcagacaacaaccaatgaaaatcctttctgacttacatacgacacaaacaccatgatccccatcgaagttggggagccatcgacaaggaggatgtttttccaggaacaacaaaataaagaaaacatgagggtggaactagagataaagcaagcctagacaacagagcatacatgctacatgaactagatggttaagtaattccaagaacatggaatgctacccatctaaagttttacttcagttaatcgacta

SEQ ID NO: 13838 - DNA, 370 bp, Glycine max
  unsure at all n locations
agcttctatactntgtacaagaatgaagctcngtttccacttgttagacaagtggcctcagatatcttaagaagggggggttgaattaagatattccaaactgtttcccctaattaaaaatctatttcactttntactcaagttatgaattcccttaatgacaatcttcttaaatattaattcaaacgaagcaacttgaatatgaatataaagcaataataaataaaagagattaagggaagagaaaatgcaaactcagttttatactggttcggccacacccttgtgcctacgtccagtccccaagcaacccgcttgagagtctcactaacttgtaaattccttttacaagttctaaacacacaaggac

SEQ ID NO: 13839 - DNA, 487 bp, Glycine max
  unsure at all n locations
agctngcatgatgggagcctttctccttctcctttgagttttactcagccaagtagtaatcttcctctgtgacctttntagatgaaggaccagagaacatgccaccccattggggaaagtagattaagcatattggcaggctgcatattatgatcatggctcccattagagtgattcctctttcttttgaaaacctggatcctttgaagaaaattaggtgggtgacaactgctcccacgttgcctcctcctcctgtcattccagatataactcctaatgacctgaaaatgcatattgttagaattaatcacaaaaaaattatttagataggatntggttggataaatctctctagaagtacttgtaggagaagaaaataataagaataaaaagagatgaatttctccataacgtaaaatgaactctacattaattaatttggagatgtcctctcatctcttagaagaattacgagagttttacaatc

SEQ ID NO: 13840 - DNA, 372 bp, Glycine max
agcttcaacctagaggagacgaaccattccaagttttggataatatcaacgacaatgcctacaagaatgacttgcctagtgagtataatgtaagtgccactttcaatgtgtctgatctatctctttttgatgcagatggaggagccttggatttgaggacaaattcttttcaaggagggagtgatgaggacataaccaatggcaaggaccatgaagcacttgaaggtcccatgaccagaggcagacttaaacaagcccaacacatcatagagacaaggctggtcatttgtatagctgtcattgatgatgattgaaggcccaagtggagaaagatgaaggcccagaggcagaggcactaccaagactactaat

SEQ ID NO: 13841 - DNA, 412 bp, Glycine max
  unsure at all n locations
agctatgttgcnatattacaatttatccttctctcctcagcagcaaaatcaaccacagcagagcaattatgacctttccagcaacagatacaaccctggatggaggaatcaccctaacctcagatggtccagccctcagcaacaacaacagcagcctgctccttccttccaaaatgctgctggcccaagcagaccatacattcctccaccaatccaacaacagcaacaaccccagaaacagccaacagttgaggcccctccacaacctttcctcgaagaacttgtgaggcaaatgactatgcagaacatgcagtttcagcaagagaccagagcctccattcagagcttaaccaatcagatgggacaattagctacccaatngaatcaacaacagtcccagaattctgacaag

SEQ ID NO: 13842 - DNA, 396 bp, Glycine max
  unsure at all n locations
agcttagtactgggaacctggatgctccatcgttcaacttgtcgatgctnggcaaagggtatgcatccttgggacacgcccggttgagatcggtgtagtcagtgcacatccaccattttccattggccttttttaccatgatgacgttggcgagctaggtagagtgcctgacttctctgatgaaattgtctttgaggagctcatctacttcctatcttatggccttacatcattcttctcccatcttactcttcttttgtgatactggtttggcctanggacaaatggcgagcttgtggcatataatgctagggtagattcttggcatgttagatggctgccacgcanacaggtctacattatggtgtaagacatcaactatgcatctgtgttcat

SEQ ID NO: 13843 - DNA, 451 bp, Glycine max
  unsure at all n locations
atctctgagtcacctgcggcatgcaagcttctgttntcaattacgagcgtctccatatattacggtctctaatccgacatcggagtaaaaagttattgtcgttagaatntgctcagagcttctgttctgaattttgagagtctcgatatactacggaacacaatcggacatctcagtaaaaagttattgtcgtttgaatttgctcagagcttctgttcttaattacgagagtctcgatatattacgggattcattcggacatccaagtaaaaagttattgccgtttgaatttgctcaaagcattcgttgtcaattacgagcgtctagatatattacgggattcattcggacatccgagtaaaaagttattgtctttntattttgctcagagcttctggttttcaattcgagcatcttgatatattacaggactcaatcggacatccgagtc

SEQ ID NO: 13844 - DNA, 418 bp, Glycine max
  unsure at all n locations
agcttatgttctcaatttcaagcgtcttgatatattacaggactcaacctgacattcgacttaaaagttaatgtcgtttgaatttgctacgagcttccgttttcaattacgagcgtctagatatattactggactcaatcagacatccgngtaaaaagttattgtcgttagaatttgctcagagctttcgtcttcaattacgagcgtcttgatatattacgggtttcatttggacatccgacttataagttatcgtggtttgcatttggtcagagcttctgttctatatttcgagcgtgtcgatatactacgggtcacaatcggacatccgaacaaaaagttattgtcctttgaatatgctcagagctnttgctatcaattctgagtgtctggatatattactgcacataatcgaaca

SEQ ID NO: 13845 - DNA, 429 bp, Glycine max
  unsure at all n locations
agatctctgagtcacctgaggctgcagcttaaggatgaggactacccttggttcaatatcatggcttactntaaggccacgggacaaccaccagaaggtatgaaatttcacaagagaatnaggttcttccaagaagccaccaagtatgtttgggatgatgttattctttttcgcattgcctatatattttcgtattggttctaacaatttgttaattgatgtgtaacaaagggagaagtcaccatatagaggccacttcaacaaagagagaacaactacaaagatccttcgagcttgattntattggcctacattcttcaaagatgctcataaccatgcatgatcatgcgatagctgtcaaagaatcaacgacatatctagacgacatgaaatgtcatcacataacatgcaagaggcataagtctttga

SEQ ID NO: 13846 - DNA, 475 bp, Glycine max
acttaaactccttcatctgcacaaggcttataatatttgaagagtatccatgtggtaccttcacctgacgaaaacactgacaaaaacatatcttcttcttcttggacagagtatggctagctgagggcaagtaaattatctttccatcagaccttgggagcaactgtgctcttatacccatatcaactatatattgacgggtttttaagccatccttcgtgatgccttgaatgttaaagagcgtaccagacacactgacacaaacatttttgtccacatgcataacatcaatacaatgtctaacgtcatgatctcacctatacggaagatcaaagaaaatggacctcttctacatatgcaactctgactttgatccttcttgtgggcgttccaacaacaatgttcatgagttgaagccgctgatatacctgttcacaatcaacgggatccgcgcaataaatgcttttgacttcat

SEQ ID NO: 13847 - DNA, 564 bp, Glycine max
agcttaacaaattgactagaaaaagttattgatttaatgacaccccaaagtgaatgctagctttcctgactttttcctataatataaaggtcaaatgtttaacactgtatctcgaccgtatataaatgcggcacgaaatgatatgtaaatacacttggatgaaaaacaacttcataaaataacatcctcctaatgatgtcactgtattaccgtaatattttattcaaaacataaaatagatatgctgaatgattcttaattttgtaagtcaattaaatattaacttaactacaaatccgataaactcgtccaaaattaaaaagaataagataaacgtgattaaagaagatcacaataatcttttaatatttaatttatcggaaaaaaaaaagttttttaacagagaagtttattttatttactttgcaattaaagaaataattatggagtaattaagtgcacttttacagtttagtcattcaatagaaaatgaataaaaagatttttaattgtaataaaaaagggaattgaatacccataatgttcggagcttgatatgcacta

SEQ ID NO: 13848 - DNA, 512 bp, Glycine max
  unsure at all n locations
tggatattntaaaaaatatatatgaattgttatccataatattatccattggttaattaataactatgtttattcaaattatttatttagagaatattaataattagtttaatattggaaggcttaaagtaaagactttgattccttgagttggccccatgagttgggctagttaaaagctaataataaagctatgttagaatcctaataataagtaaataatgtacaaaacttaaaatattgatatgaaccaacaagaatttaagtattaaacttaaaatagatcaggtatgttaaattcacggtaaatagcaggagcatgcgatagaggtgctattgtgattgataacaatgactacaataggaaccacaaatatacctcatgacaaccaggatcaatgcctatcaagaccaaccattgccagtactattttatatgctccatttcacttgtaaattatgtttaacagttccaccacgtgcgaaagctagataacccaaaagccttatgc

SEQ ID NO: 13849 - DNA, 525 bp, Glycine max
actaagcttgcactcttttgcatggaatataaacctgccaccacctcccgtgagccgagttactcgcgaaaacatggtgatcctgtatgtcccagttacaatcatagtccctataacacatccacggcttcaaacccaagtagtgtatggtgtacacgtcatcaaggagctcgtgcttattcccataaccaatactacgaaaagtcgtgagctgattcaccttggccggcaaacggtgccaccacgtgaagatctcgttcagaaaaccctggtcgccgccgttgtaagaacgcaccttggaagtcatgttcatcattctctggaacatgcattgcgacggctcgattaccatcgaccccgagttgaataacgctttctcgttaggtgctgcggataattgacggagcatgaataaatggtcgatgcttctgagaagtaagaggttggagtcaataatgaagatgatcgattctgtcgtacgttgtgagctgccacattcgtagcatgctggttgtatgcaccctt

SEQ ID NO: 13850 - DNA, 410 bp, Glycine max
agctttttatttttagtagatgaagatgaatctgtggccacctcatggactcctctaaggataatagcatcatttcttgcactgaattgttgggagttggaagccatcttctcaatcaaattcctagcttcagcaggggtcatatcaccaagagctccaccattggcagcatcaatcatattcctatccatgttgttaagtccctcatagaaatattgaagaaggagttgctcagaaatctggtggttaggatagcttgcacacaatttcttgaatctttcctagtactcatacaagctttctccactaagttgcctgatgcctgaaatgtcttttctgatggcagtggtcctagatgcagggaagattttctccaagaacaccctcttaaggtcatcccagctgaaaac

SEQ ID NO: 13851 - DNA, 561 bp, Glycine max
  unsure at all n locations
tcttggttggaaagaataaggaacctatcaacattttacagtatgctgatgatactgttttttgtggagaggctgtgtgggacaacattcatgttattaaagccttattaaaaagatatgaattagtttctggtttaaagattaattttgctaaaagtcagtttgggattattggtggtggtgtcaattgggctttggaagcagctaataccctgcactgccgacagctggagtatcctttcctctatttaggcatacctattggggctaatccctcaagccagctggtgtgggagcctatcatcactaaattcaagtcaaaattagccaaatgggctcagaaaaatatatccatggctgggaagaatactctgataaattctgtcctcaatgccctccccaattatctcctctccttctttaaaatacctcaaaaggttgtcaaaaaactgatatcccttcaaaggaanttttctgtgggtggagacaatgatcataaaaaaatcctttggtgaaatgggctgatatttgtttgcctaagactgatgggggactggggat

SEQ ID NO: 13852 - DNA, 516 bp, Glycine max
tctacattcaatttcgagcttttcgatatattacgggactcaatctgacattcgagtaaaaagttattgtagtttgaatttgctcagggcttcggtattccatttcgagcgtctcgatatattacgggactcaatcggacatccgagtaaaaagttattgttgtttgaatttgctcagagcttcggtattccatttcgagcatctcgatatattacgggactcaatcagacatccgagtaaaaagttattgtagtttgaatttgctcagggcttcggtattccatttcgagcgtctcgatgtattacgggactcaatcagacatccgagtaaaaagttattgtcgtttgaatttgctcagagcttctacattcaatttcgagcttctcgatatattacgggactcaatcagacatccgagtaaaaagttattgtcgtttgaatttgctcagagcttcagaaatccatttagagcgtctcgatatattacaggactcaatcagacatccgagttaaa

SEQ ID NO: 13853 - DNA, 367 bp, Glycine max
tgctttatgggaagagaggggtctatttttattcccagctgcaggaacacggtggagagatattcgaaagagatgggatattatacgactgtgccttctctgcttgtgaccaagggctaggactgaatgagctatagtatgaagaccaacttcatttttagtcaataatgacatttataaaacaactatactaattggcggtgttaatttggggcagctattgcgtcatgcaactgatcggtgtcccatataaccctttgcatctgtactgtaaaaaagggagagctggcgatgatccacatgcagaggagcaatgagaagagtgtgacaatgcggatggtgctctgaaagaattgcgaggctcttt

SEQ ID NO: 13854 - DNA, 483 bp, Glycine max
  unsure at all n locations
tgcanaaagtgaaaatgaagcctcagctgatggaaccttgttcatacaaattgttggtagnctaaaattcatctgccacaacaaaccagagatcacattcaatgttggactggtgagcagatttatgggtgaccctaagcaatcacacttgctggatgctaaaagagtcatgaggtatctaaaggggacattgggatatggaatcattttccctcatcaaaccaaagaggatgataatctacatcttgtagcctattcagactctgattggtgtggagatttggttgataggaaaagcactgtgggacaagtattcctactgtctggctctcccatatcctggaactcaaagaagcaactagtggtggcactatcaacttgtgaggaagaatatattgcagcttgttcagctccttgccaagcactgtggctttcatccttgattaatgaattgaaagtatcttcgaatgaagttgttgaact

SEQ ID NO: 13855 - DNA, 583 bp, Glycine max
agcttgcttaagttcgaatattgatttctttaatttgcacaccatgtgttccttcccttcaactgagaatcctattggctggtccatgtaaacattatcctctaaatctccattaagaaagataattttcacatatatttgatgtagttctaagtcataatgagctatcagtgtcatgataatcctgaaggagtcatttcgtgaaactggtgaaaatgtctgttaatcaacaccatttctttgagtaaaacccttagcaacaagtttgaccttgtaatgtttaacgtttccatgagggtcatgtttagtcttaaagaacaacttacaaccaactctcttacaatcttctaacaattctacaaggaccaaaacaccattctgttccatggatcttaactcttctttcatggcttccaaccacttattagaattatcacaacttatagcttgtgaaaaacaaactagatcatcattaataatgcttaattaatttctaatcatgtggatggaccacatactcatttgaaataattggccttcattctcgttgagacctcctaaatgtacttcttttgattcttct

SEQ ID NO: 13856 - DNA, 483 bp, Glycine max
  unsure at all n locations
agcttgttcatcttgagataataggtgtttgtcctcatttgaagntgatggtgcaacatatttctttggcctaacaggaactccaatatttttacagcttctaatgttatgattggtttggccacacctttcacatgtaaagtcagccaattttctctttagcctatgtcctgtgacattgtcctcatctaccgatctccttctatttttctttggccttcctctttgtacccttttatgtggaggaataaggtgtgtatattgtgtctgggcccaatattgcggtccttggactggctcaataaaatgctggtatgtcttataataagcttctattgacagtcactcatgacacatgtcctcaggcttcccttctttgtgagatattggtgcaatggcatgttggcttgtcatccctacattaaagttggaaaataatcacacatgtaggttacgaatgaaaaaaaaaactgtaaagaacac

SEQ ID NO: 13857 - DNA, 448 bp, Glycine max
tctgttttcaatttggagcgtctcgatatattacgggactcaattttacatccgaatataaagttttcttcggttgaatttgctcagagcttctgttctcaattccgtgcgtctcgatatattacgggactcaatcggacatccgagtaaaaagttattgtcgtttgaatttgttcagagcttctgttttcaatttggagcgtcttcatatattacgggactcaatcgcacatccgaatataaagttattttggtttgattatggtcagagcttctgttctcaatttcgtgctcctcaatatattacgggactcaatcagacatccgagtaaaaagttatagtcgtttgaatttgctcagaacttcttttttcaatttcgagcgtctcgatctattatggaactcaatcatacatccgagttaaaagatattgcgggttgcatttgct

SEQ ID NO: 13858 - DNA, 576 bp, Glycine max
agcttggattcctcaaatgtacaactaagcatggtgtttatataaagggcagcaatactactaacttgactgtagtgtgcctgtatgtagatgacttgcttgtgacaggaaataatgagattgaaattgccaactttaaaggagagatgatgagagaattcgaaatgactgatttggaccttatttcttattttcttggaattgaattcaagagaactgatgagggagtgatcatgcatcaagggaggtatgcaagagatgtactgaagaagttcagaatggttgactgcaattctgcagacacacccactgccactggtgtgaacttggtgaaagatcctaatgaagaagaagtagatgtaattttgtatagacaaatggtgggctcactgaggtatcttttgttactagacctgacttattgtatgttgttggcttaattagtagatatatggagaatcctaaactttctcacttctgtgctgccaagagaataatgaggtatgtgaaaggtactctcgattattgtatttctgtttcccagtgctgccaaaaaaagtaatggtctggggatat

SEQ ID NO: 13859 - DNA, 582 bp, Glycine max
tgtgtagagttgtcacagacaaagggatctaaaaattataaactaaaaaattaataatcaaatagtatggataaaaaaagtgcataaatcaagtgcaaacccttcaaaacaaagtaagatcaaatagtaattttagctgaaaagagaaaaagaagcaaaaagaaaaaaaggataagcaactaaagttggaagctaaatgtaagaacaaaaccaaaacccttgaaatttaaggcactattagaaattacactttcaacatcggttatttagagcattctacatcggctctaaaaccgatgttgaaagtgacgatgttgaatgtatcatcgttaacatcgattttcaaaaactgatgttaacataaatatgataacatcggttttctaaataaccgatcttaaacacaaagaactacaacaaaaaaagtgtatgcatgatgaaagttgaccatcggtttgtagtaaaactgatgttaatggtatatattgacatcggtttcagtagaaaaccgatgtcaatgttgatgatgcatatacttatttgttgtacatctttgtatataacatcgactattcatagaaa

SEQ ID NO: 13860 - DNA, 634 bp, Glycine max
tcatgaaataagtcatcaaaatgttgaaatattttattttattatgataggaaatgatcttgttttactaccagagaaatatcaatgtgctttttcatttttgttttaccagattttttttcattaatttattgctatattttagttactattaattacagttccaaaaatttatgtcacagacataaaaatatttaatggcaataaattccacaaagatacatgataaattgtgaatataatcaatttttatattgatttttaattacttgtcataaatttttttatttgaatatattttaatagtctattttttgtgaaaagtattaattattaaatatttaatttaataaattatacaataatgaatactagtatactaaaaaagatattaatttttgtgtatgatgtatacaaagttttgaatttaatttgtattaaaagcaataaaaaattcaataaatttattacatatgtgaattcctaattcgtttagaatgaaaaaattatattaaaaaataatttaaaataattattataaaaatcaataatttatcatccacatttatttataaaaataatattataaacattatatttaatgactataaagagttattatatatgctgacta

SEQ ID NO: 13861 - DNA, 564 bp, Glycine max
tgctatcacagggcggatcgcccggtggcaagttttgctatccgagttcgatatagtctacgtcacccaaaaggcgataaaaggaagcgccttggcagattatttggctcagcagcctctcaacaactatcaacccatgtatcccgaattcctggatgaggacatcatggccttgtttgaggaaaagctagacgaggaccgagataagtggattgtgtggtttgatggagcgtcaaacgttctatgccatggcgttggagcagtattggtctctccagacaatcaatgtatacctttcacaaccaggctggggtttgactacaccaccaatgtggctgagtatgaagcatgtgccctggccgttcaggcggcaattgactccaatgtcaagctactcaaggtgtacggggacttagcactggtgatccaccaactgagaggggaatgggaaactagagaccccaaggtgataccctaccaagcctatatcaaggagttggctggttcctttgatgagatctccttccatcatggttccccgagaggaaaatcagatggcggatg

SEQ ID NO: 13862 - DNA, 407 bp, Glycine max
cagcttatattcattaatttctagagttttttgtggatgcaataactcttttattttttcatgtgctcttgaaagcgagatttatttttggctgtaaacctaacaggctacaataagccaccagtagtcagaatatgatgaaagccctgtattttcagtttactgtaggagctctgccattatatctgcgaacctttgcaggatactgggcttatggatcttcaacagccaacctatttgatgagtgatgtgaatggtccagtttgggctaaagccattgcccattattgcagacttttttccatcagtcattgcattgcattgagtaacttttaaacttcaattttgtgctactaaatattctatctacaatggggtcctggcctaataatctatcttttgctttt

SEQ ID NO: 13863 - DNA, 493 bp, Glycine max
agcttaactacacatacctctctaatagctaagttcacctccttgagatgagaagctagagcttagctacacaccccctataatagctaagctcacccatatgccaaaaaaacatgaaaatacaaaaaaaagtccctactacaaagactactcaaaatgccccgaaatacaaggctaaaaccctatactactagaatggccaaaatacaaggcccaaacgaaggaaaaacctattctaatatttacaaagataagcgggctcatacttaacccatgggctcgaaatctaccctaaggctcatgagaaccctagggccttcccttggatctctagcccaatctacttggagtcttctatccaatgcccttgcggggtaggattgcatcattccctccaccttggaaaggatttgacctcaaatcccaaggttcttcatactctgggctccttccctcgacacctgtaaaaagaacaaaaacatatgtattagtg

SEQ ID NO: 13864 - DNA, 545 bp, Glycine max
agcttttgaatgctctattcaatggagttgacaagaatatcttcagactgatcaacacttgcacagtggccaaagatgcatgggagatcctgaaaatcactcatgaaggaacctccaaagtgaagatgtccagattgcaactgttggccacaaaattcgaaaatctgaagatgaaggaggaagaatgcattcatgacttccacatgaacattcttgaaattgccaatgcttgcactgccttgggagagaagatgacagatgaaaagctggtgagaaagatcctcagatccttgcctaagagatttgacatgaaagtcactgcaatagaggaggcccaagacatttgcaacatgagagtagatgaactcattggttcccttcaaacctttgagctaggactctcggatagggctgaaaagaagagtaaaaatctggctttcatgtccaatgatgaaggagaagaaggtgaatatgacctggatactgatgaaggtctgactaatgcagttgtgctctttggaaaacagttcaacaaagtaatgaac

SEQ ID NO: 13865 - DNA, 517 bp, Glycine max
tcggattgtcaattgcaccatgttccaagaagagtagagggtgccacctttgttgagtggttttattagcattttgttagttgaaataaaggcccaaacttgtgttaaagtggatgtcaattctcttttgattttcaccacctatgggcttgttttaatttaaagaaattaaggtttaataagatggaaactctaggcttgtggctgcctctttgatgcaagctccattggagcttgtaagcctaggatcttcttcatcaatggattcctttgcttcttggaagatgaatggcagcggaatgaagaaaggaagagagagaggacacgccacttcaaagagaagatgagtctagaagaagctcaccaccatatgaggccatggataagagcttggaggaagaaggagatgaatgaagggagaggaagagaagagcacgaaattttgtgctctatatgagctttgaaaatctgaatttaatattcacatgatcaaagttgaaaaaaatgcacacacatg

SEQ ID NO: 13866 - DNA, 667 bp, Glycine max
tgtgatatttttctttgccttaaatataattttagtttccctattttttaaaattcataaattattttttatttaaaaatagagacatttagttctcattttttaaaaaattataattttaatccctctattttaattagagacatttagttttcacttttgtaaaatttgtgatgttagtctttcaaaaatattaattggtaaaagattaatctaatgagacccaaatttaatgatgtgacacaagattatttgtttaatctatatcataatcaacttaatctcttaatagtcaacacttttagtttaactaaataaccaaaatcgtagatgtaataaaattacgggttaaatgtctctattttaaaataagataatcaaaattatagattttaaaaaatataaacatttaagcatttttttttctattgtataaactattttttgtccccactagtaaatttttttggatctgtcactggctgagggtactcttaaatcctaagagggtgaaaaaaatagttgcataaaaatatgaaagagtaatgtgaccctactataaatataaatacttgtacctgcgttagtatagataactttctatgtttcgtcaatgagtaatgtatctttcttttattgtaagaatactcttacctaacggaatgat

SEQ ID NO: 13867 - DNA, 402 bp, Glycine max
tggatttcctcttattagggaatctatccttcctacgatggagccaaatccagtcccccacattaagaactagctcctttcttcctctattgtctttagttgcatacacctttgtttggttctctatttggttaaccctctcatccagctcctttacaaactttgacctagattccccttctttatgtataaaagaagtgtcaagtgggaggggaattaggtctaaggatgttagaggattgaacctatagacaacctcaaaaggggattgcttggtagttctatgaacccccttgttgtaggcaaattctacatgaggaagatactcatctcaagacatatggttgcctttcagaagagcccttaaaatggtggataaagacctattcactacctttgttt

SEQ ID NO: 13868 - DNA, 464 bp, Glycine max
agcttatgaagaaaagaaaaggaagaaggaagggatcatggagcaactactcaagacacaagttaactcaatggtgagcatcaaggagcttgatgaatcagtgagctgcaacgtggcctttggagattaatccaaggtagaaatgaaaggaaaaggtaacattcttattcgtttgaagaatggtgagcatcaattcatctcaaatgtttattacgttctaaatatgaaaagtaatatcttgagcctggggcaactcctagagaaaggttatgagattcgcttaaaagacaataacctttctacaagagacaatgaaaataacttgattgctaaggtgttgatgtcaagaaatggaatgtttgtgctcaacattcaaaatgatgttgcaaaatgtctcaagatgtgctacaaagatgcatcttggctttggcatcttcaatttgggcatcttaattttggagcat

SEQ ID NO: 13869 - DNA, 500 bp, Glycine max
ctgaatgctctattcaatggagttgacaagaatatcttcagactgatcaacacatgcacagtggccaaggatgcatgggagatcctgaaaaccactcatgaaggaacctccaaagtgaagatgtccagattgcaactattggccacaaaattcgaaaatctgaagatgaaggaggaagaatgtattcatgacttccacatgaacattcttgaaattgccaatgcttgcactgccttgggagagaggatgacagatgaaaagctggtgagaaagatcctcagatccttgcctaagagatttgacatgaaagtcactgcaatagaggaggcccaagacatttgcaacatgagagtagatgaactcattggttcccttcaaacctttgagctaggactctcggatagggctgaaaagaagagcaagaatctggctttcatgtccaatgatgaaggagaagaagatgagtatgacctggatactgatgagggtctgactaacgt

SEQ ID NO: 13870 - DNA, 401 bp, Glycine max
aatacgcctgtagtcatttaaggattgaggatgatttgatttggtgataaaggccatgaaggaagcattgctgcctctaagaaaacttccatggcagtggaactcatccacaaatctcctgaattcaggtctcagaatcttccaaaaagccttaataaagttgaaattaaaaccatcgggacccgggcatttatcaccaacacaactccaaacagcatatttaatctcttgatcagaaaaaggggcaatgagtccctctctttgattctgatcaatggagtggaaaaaaaccccatcaagggtgggtctgaaactctcattttcagaaaatctatgaaagaaaaaattacaagcttcattcttaatttcggtcaggctgttgaacccaattcccatcaatg

SEQ ID NO: 13871 - DNA, 530 bp, Glycine max
agcttgtagatgctggaaatccttctggaatattagtggagagcactgatgggtggaacacagcttctgttgtgggaacattctcagggcctaagcatcgcttggccacagcagcaactgtgaaggacgggaaggtgtatctgaaccatatggttggaattggatacccaaaaaagaagcatgcaattgttgaggcacgtttttaacgcatactttctagaaatctaaacattggggaactgggaatgtggggatcatacatttacaggacgtttagttgaaatttggtgtacctttgcttatttatgtttggttttgttgcattacttggcctcagacctcaatgcttttcccttgaatctcaacctaacataagatgctcgatcgagtcagctaaattagccttctgtcttggaaaaattattaggtaattccgaattatgaaagatctagaggttccagattaatctctattagatatacatttaagtttttcaatttaagaaagatagttaataacactctttaca

SEQ ID NO: 13872 - DNA, 453 bp, Glycine max
agcttggattcctcaaatgtacaactaatcatggtgtttatataaagggcagcaatactactaacttgactgtagtgtgcctgtatgtagatgacttgcttgtgacaggaaataatgagattgaaattgccaactttaaaggagagatgatgagagaattcgaaatgactgatttggaccttatttcttattttcttggaattgaattcaagagaactgatgagggagtgatcatgcatcaagggaggtatgcaagagatgtactgaagaagttcagaatggttgactgcaattctgcagacacacccactgccactggtgtgaacttggtgaaagatcctaatgaagaagaagtagatgtaattttgtatagacaaatggtgggctcactgaggtatctttgttgtactagacctgacttattgtatgttgctggcttattaataaatatat

SEQ ID NO: 13873 - DNA, 292 bp, Glycine max
ataatctccgctgccacccatggaactctaaatctcccaccttttggggtgggccattcttggatggccctgattttctcaaggtccacttggaccccatttctaccaactacaaaccctaagaaaactatattatctacacacaaagtacacttctttatatttgcatatagggtgtttttcctaaggactggaaaaacctgcctgagaggtcctaagtgatcatctaggctcctactgtacactaaaatattcatacaataaacaactaccaatctacctatgaaatcct

SEQ ID NO: 13874 - DNA, 328 bp, Glycine max
tccgtgtttaattacgagcgtctcgatattctatctgacacaatttgacatccgagtccaaagctattgtcgtttgacttttcttaaagcttccgtttttgatttcaagcgtctcgatatattatagggctcaatcggacatccgagttaaaagttattgtcgtctgactattcttagagattccgctatcaacctcgagagactcgatatattacagggctcaatcgaacatcccgagttaaagctattgtcgctagatttttcctaaagcttccgttttcaattacaagcgtttcgatatcctacgcgaaacaatcggacattcga

SEQ ID NO: 13875 - DNA, 385 bp, Glycine max
tgcaagctacacagcgggagaggaaataacacctgctcttttgaaagccaataacgattccagaattggcatcactgggctctctgaagactttgcttcttcctcattttgcttagatgaactcacattcattgttcactgcgcccagaataatgggatgatgattataccaatgctttataacgtgtattcttctgatgtcacacacccagaggggtcttatggagaagcattggctaagcataagataagatctcccgaacagctccacaattgggagatggctctcgcgcaagttgctgacttgcctgggcttcatttcaaatacaggtaccccatgatacccacctttttatgttttaaattttcattggattaattaagt

SEQ ID NO: 13876 - DNA, 520 bp, Glycine max
agcttttgggaggggctgaagctcctgctatctccctaaaacccatcattgtgcatgtgttgttcattttattttattttacatttttaaagaaaagttagttgtgtctgaatgtcatctttataaaaactaaaaactagttgtgtgtaagtgtgtattattcttttttttagtgtatatgttaggagtttcacattaacaagaataaattacttaagagtgtgtttggatagagaattttaatttaagaaggtaatttatcagagaatttgaatttttgtaatttagaattcattgtttggatgctttttatgaagaatttaaaattttgaaattttaaaacagaattttaagcaactaaaaatctggaatttcaatctccttctaataattgagaaattgaaattattctttttttaccgctttttcagaaacacgtatacctaacacacccatcatatcttctcttttttttatcctcataatttaatttctttatccaatacaaattttgaaataa

SEQ ID NO: 13877 - DNA, 506 bp, Glycine max
agcttgaccaatgaaaacaatatgatcagcgttttttgagaatattaataggctctttttggtttccaaccaagtagctacggcacagattttttacaatggcctgtctcatcattccaatgagaccttcccccactaagttaaacaacaaaggggctagaagatccccttgtctcacacctcgagtaggagcgaattctttagtcggactaccattaactaaaatggaaatagatgctgattgaaggcaggcagcaatccattgtctccatttagtacagaatcctagtcttgacagcatgtagtccaagaaagaccaagatactgtatcataggccttttcaaaatccactttaaagaccataactggctgctttgtcttcataagcttcctccaccacctcattaaggatcagaattccatgaaggaggctgattgcctttcatcaacaatacccgaaaaacgggcctcaacctgtttggcaaagcttggatatgactttgta

SEQ ID NO: 13878 - DNA, 455 bp, Glycine max
agcttgctgaagatatggaacatgtggtctatgctatttcaaaagctgttgtacatagcaaggtgcaacaactatatactgaagaaagcaaggtgcaacaactatatactgaagaaagcaaggtgcaacaactatatactgaaatccaaggtcgtaatgttgagggggctatagaaaaggtaggtactcttgaaggggagcatgtcattaatgaaatttcttcctccattcagcaaacagactgcctgagaaaagtggttcctgttggtgttcttgctgggtccatcttagcttccttgaggaaatattttaatgtaactacacttcaagatgatcacagaagatctctgatccatgatgatgaggaaaaacctaccacgaataaatatggcaatcgaacgtggcacaaaaatagatcaagtacctgacgagaaaactagtttggaacatcctat

SEQ ID NO: 13879 - DNA, 280 bp, Glycine max
  unsure at all n locations
aaaactcttttcttagtatanacgttgtttctacttcaataccctgtgaactacttcacatagacgttattggtgcctctagaactatgaggttgggtggtaattactatggcttagttatagtagatgattactcaagattcacatggactttgttattgaaaaccaaagatgaaacttttgatggtatttgcatacttgccaaggtcattccaaatgataaaaggtcttaacattgtttcacttaaagttatcatggaggtgaatttcaaaatgagtc

SEQ ID NO: 13880 - DNA, 401 bp, Glycine max
  unsure at all n locations
tcactatgaatgacaaattccttgggataaaggtagtgttgccatgntttcacagcctgtactaaggcatacaactccttatcataagttgaatagttaagggtatgaccacttaacttttcactaaaataagcaattggatggccttcttgcatcaacacagccctcatcccaacattttgaagcatcacactcaatttcaatagatttttgaaagttggcaacgcaagtatggcggcattagttagctatcgcttaagaacattgaagcttcttcttgtttctctcctcatttgataccaacatatttcttgagcacttctatgagaggtgcttgccatgtgctaaaatnctacacaaatactctataaaaacttgcatagccatgaaaacttctcacc

SEQ ID NO: 13881 - DNA, 354 bp, Glycine max
  unsure at all n locations
ttcgtttaattacgagcgtctcanaatcctactggacacaattggacatccgagtcatatgttattgtcgtttgaatntgtttagagcttatgttttcaattacgagagttntgatatcccacgggacacaatcggaaatccgagttaaaagttattgtcggttgatttttctcagagcttccgttntcaattacgagcgtctcgatatccaacgggacacaatcggacatccgagagaatnattattttcctttaaatttgctcagagcttcatgtttcaattaggagcgtctcgatgtattatgggtctaatcggacatccgagttaaatattattgtcgttgacttttata

SEQ ID NO: 13882 - DNA, 360 bp, Glycine max
  unsure at all n locations
cctctcttcccttanacttcttttatttattgctatttatcttttgctntaaagaagtnntatttgaatngtctttngagtaattcatgttaagggtgcattgttaatccgaaaagagagagtgaaagtttaattgtggaatagtctttatatcttaattcaacccccctttttcttaaggtaactgaggctatttgtccaacatcctattcttgataactcacttctctcttaaaagacagactttccggaatgaggtcacatgaacgtcttgaaacacagtcaatcaaatgctctgtttttntatttattttattgtcttaaccccttcttttattttggaacttatttgttttggac

SEQ ID NO: 13883 - DNA, 472 bp, Glycine max
  unsure at all n locations
acctgcngcatgcaagcttaacatcagaccacttccagggtgctggaactacttcacatggacttgatggngcctatgcaagttgaaagccttggaggaaagaggtatgcctatngttgtgtggatgatntctccagatttacctgggtcaactttatcagagagaaatcagacacctttgaagtattcaaagagttgagtctaagacttcanagagaaaaagactgtgtcatcaagagaattaggagtgaccatggcagagagtttgaaaacaacaagtttactgaattctgcacatctgaaggcatcactcatgagttctctgcagccacacaccacaacaaaatggcatagttgataggaataacaggactttgcaagaagctgctatggtcatgcttcatgccaaagaacttccctataatctctgggctgaagccatgaacacagcatgctatatccacaacagagt

SEQ ID NO: 13884 - DNA, 461 bp, Glycine max
  unsure at all n locations
gctccttcaactgcacaaggctcttaatatttgaagagtatccttgtggaaccttcacccgacgaagacactgacaaaaacttatattcttcttcttggacaaagtatggcaggctggnggcaagtaatatttcttcccatcaaaccttggatgcaactgtgatcatatacccatatcagctagatcttgacagatattcaagccatccttcngtcttgccttgatgttaaagagcgttccaatcacactgtcacaaacatttttctccacatgcataacatcaatacaatgtctaacctcaagatcacaccgtaaggaagatcaaagaaaatgaacctcttcttccatatgcaactctgactttatccttcttttgggtcttcccaaatacaatattcaggtgttgaacccgttgatatacctgctcactagtcaacagtatcggcgcaatatcatgctc

SEQ ID NO: 13885 - DNA, 355 bp, Glycine max
  unsure at all n locations
tgcaagcttgtgactcttgtcaatttcttaaaactagtttctgaaaaagctgngactnttgcaagaatcttcacaaacaagctactcgaagaattgtgacttttggaaatgtatttttcgaaatcagtcactggtaatcgattaccattaaggtgtaatcgattacacattaacagatgtgacttctcactttaaattttgaaaatcataacatttagaagctctggtaatcgatcacaagttttgtgtaatcgatacacaagttcaaatgatttaaaatattaacacaagtgtaatcttgaaatcgaaatctactgtttaaacacnggcatcgatactacctctggtatcgata

SEQ ID NO: 13886 - DNA, 411 bp, Glycine max
  unsure at all n locations
agctntnntatttcagcagatgaaaatgaatctgttgtcacctcatggactcctctaaggacaataacatcatttcttgcactgaattgttgggagttggaagccatcttctcaatcaaattcctagcttcagcaggagtcatatcaccaagggctccaccactggcagcatcaatcatactcctctccatgttgctaagtccctcatagaaatattgaagaaggagttgcttataaatctggtggtgagaacagctngcacacaatttcatgaaccattcccagtactcatacaagctctctccataagttgcctgatgcctgaaatgtcctttctgatggcaatggtactagatgcagggaagaatttctccgagaacaccttcttaaggtcatgccagctganaatgg

SEQ ID NO: 13887 - DNA, 281 bp, Glycine max
  unsure at all n locations
aattgctctgagcttcaacattcaatttcgagcgtctcgttatatcacgggactcatatgtcaatgatgggagaactaaagtactntctgggattacaaatcaagcaaactcaagaaggtatattcatcaatgaatccaaatactgcaaggaattgatcaaaagaattgggatggatagtgcanaacacatgtctacaccgatgagcactaattgttacttagataaagatgaatctggtcagtctatagacatataacaatatcgaggtatgatcggatc

SEQ ID NO: 13888 - DNA, 251 bp, Glycine max
  unsure at all n locations
atatggaagaagatgttgatattggttaatcttccatactagtctgatctagatgttagacattgtatngatgttatgcatatcgagaaaaatgttngtgatagtgttattggcacgcttctaaacattcaaggcaagacanaggacaatntcaatactctccaagatctagttgagataggtatacaagatcagttacatccaaggtctgatggtaacaaaatatacttgccctcaacttgtcatacttt

SEQ ID NO: 13889 - DNA, 238 bp, Glycine max
  unsure at all n locations
gcatgtagagtccatggtaacttaaattctgagagaggacaactacanatctntntgagtnggaacccgtgaatgctatgccttatgttatgttgtctaacatgcattatgaatctcgganatgggatgatgttgtganaatacgaanggtggtgaaatcaataggaataacanaggagcctgtgatgtagtggatcaagatgaactacagagtgcatacattcatttctgaagatag

SEQ ID NO: 13890 - DNA, 109 bp, Glycine max
aatgcctctaacagcacctttgtcaatgaatttcttcatgcctcttaagtgcaaatgtccaaatctttgatgccatattctgacttcatcttctttggaggatagacat

SEQ ID NO: 13891 - DNA, 388 bp, Glycine max
  unsure at all n locations
ctctataattacctcacctctcaatgagctggtgaagaagaatgtggcatntaacttgngtgaaagacaagagcaagtctttgttcttcttaaagaaaagctcaccaaggcacctggtgtagctcttcctgactnttctaaaacatttgagctagaatgtgatgcctctaaagtgtgagttggagcagtattgttacaagggtgggcacctctattgcttattntagtgaaaaaattcatggtgccacccttaactaccccacctatgatanagcactntacgccttaataagagccctncanactnngggaacatactcttgttncaaggaanttgtcattcatagtgatcatgaatcacttaagtacattataaggtaaagcaagt

SEQ ID NO: 13892 - DNA, 235 bp, Glycine max
  unsure at all n locations
taactcgcctatgcnttttcttccatgccatatgtagcanagtgcgtgatcctgtcaagtttgatgagctgganaatgaggctacaattatattgtgccagctggagaatgtatttccccatgccttctttgacatcatgattcacttcattgtgcatctcatcagagaaatcaaatggtgtggtcctatttatctgtggtggatgtacccggtttatcgatacatgaagatctt

SEQ ID NO: 13893 - DNA, 217 bp, Glycine max
  unsure at all n locations
ttaaattctgagagaggacaactacanatctntntgagtnggaacccgtgaatgctatgccttatgttatgttgtctaacatgcattatgaatctcgganatgggatgatgttgtganaatacgaaggttggtgaaatcaataggaataacanatgagcctggatgtagttggatcaagatgaactacagagtgcatacattcatttctgaagatag

SEQ ID NO: 13894 - DNA, 315 bp, Glycine max
  unsure at all n locations
gctgtagttgctgcacatgatgtccaacgttatgtcaaagaataagatcgggctgcacaatgcacaaggcaagatatagtgtcaaatgaagaaatgaagctgcaggattcacgatgtcggatataatgtccacgacatcctgcctgaaaatactggaattgctaaaagcattgaagctgcaggatccacgatgtcngatacaatgtccaggacatcctgccccgaaatactnggagtgctaaaagcattgaagttgcaggatccacgatgtcggatacgatgtccaggacatcttgcccanaatacctgacatat

SEQ ID NO: 13895 - DNA, 242 bp, Glycine max
  unsure at all n locations
ttctatctcactntcaatgcaagttatanattcccttaanaatgaactcttaaataatgattcanatagaacaatctgaatataaatataacgcaataataaataaaagagttcaagggagaagaaagtgcacactcggatntatactgtgtcgtgcacacncttgtgcctacgtccagtccccaagcaacccgcttgagagtccactatcttgtaaatctctttacaagttctacacacac

SEQ ID NO: 13896 - DNA, 199 bp, Glycine max
  unsure at all n locations
ctatccaatggccatgaaagaagacagatcagctgcacaacanatcggaatgaatacctgcatgaccatntgcagaagatgcatgccagtaaattgagcttgatagccacccactggtngcacaaatatcaatcatggcctgaaatacgcgtatactctgatctaatactgatttcaagtctgtgacatatgcactaat

SEQ ID NO: 13897 - DNA, 247 bp, Glycine max
  unsure at all n locations
gctatgctgcnacatctacacagacctcctaacctagctganaattatccacaacagaataattataacctctccagaaataggtacaatcccgaatggaggaatcatcccaaccttagatggtcgaatccttcacaacaacagcagcaacaacaacaaccttattttcaaaatgatgctggcccaagcagaccatacgttccttcaccaatccaacagcaacaacaacaacagccccagaaacaac

SEQ ID NO: 13898 - DNA, 313 bp, Glycine max
  unsure at all n locations
caattccttgaagatacacaaacagctaatggctcatggtatggaagttggngagttngctacatttatggcacttggttngcacttcgtggtcttgcagcggcgggtaaaacatacactaattgtgctgccattcgcacaggcgttaaatatctactttcaacacagaaagaggatggtgggtggggagaaaagtatctctcatgcccaanacaggtttgtaattgaatggccatggtcaatacttaatgttcttcactttcactangaanttataataatagtagtaataatgtcttactaaatgaaaaca

SEQ ID NO: 13899 - DNA, 206 bp, Glycine max
  unsure at all n locations
atggtgtggataccctgtgcacaatcccatactntntaagcaaggcatgcattganttngtgcanaaatgggttccttgatcactaacgatngctntaggtactccaaacctgcaaaacagattagatctaacacaatctacaacaaccttagcatcattagttctagtaggcttagcttctacccattttgaaacataatcaact

SEQ ID NO: 13900 - DNA, 176 bp, Glycine max
  unsure at all n locations
atacagacctttgctcttccatgcagcaacctggagtaattgagcagcctggagcttatgctgcannacattacaatagacctcctcaacctcagcagcanaatcaaccacaacagaacaattatgacctctccagcacagatacaaccctggatggaggaatcactctaatctca

SEQ ID NO: 13901 - DNA, 405 bp, Glycine max
  unsure at all n locations
ttcaatcaatagacctccaatctttaatggagagggttaccactaccggaaaacccgaatgcagatgtttattgaggcaatagacttaaatatttgggaagccatagaaatagggccttatatacccaccacagtagaaagaatacaatagatggaagcacatcaagtgaaagcataacaatagaaaaacctagagataaatggtctaaagaggatagaagacgagtacaatacaatttaaaagccaaaaacataataacatctaccctgngaatggatgaatatttcagtgtttcaaaatgtaagagtgctaaggaaatgtgggacactctacaattaanacatgaaggaactacagatgttaaaagatctangataaacacattaactcatgaatatgaacta

SEQ ID NO: 13902 - DNA, 419 bp, Glycine max
  unsure at all n locations
ttatttccagaaggaaattcaatcaatagacctccaatctttaatggagagggttaccactaccggaaaacccgaatgcaaatttttattgaggcaatagacttaaatatttgggaagccatagaaatagggccttatatacccaccacagtagaaagaattacaatagatggaagcacatcaagtgaaagcataacaatagaaaaacctagagataaatggtctaaagaggatagaagacgagtacaatacaatntaaaagccaaaaacataataacatctaccctgggaatggatgaatatttcagtgtttcaaattgtaagagtgctaaggaaatgtgggacactctacaantataacatgaaggaactacagatgttaaaagatctatgataacacattaactatgatatgacta

SEQ ID NO: 13903 - DNA, 399 bp, Glycine max
ttaagtcacctgcggcatgcaagcttgttatcccagctgatgtacccattatcatggcctccccagaaggcaccagcatgcttggccaggccaggagcagtagcaagcttaaggtacgatgaatttccagttgcaaagtacatccatgcgcctccccaaacatactcatcccagtaactggtagaattgtaaaatatagaagcttccgaactccctgcactgtacctgcctctctgctccctagaaaacttgaacagcgtggtagcaccatgaactagtttcttcgaataggccttgttgtccttgaaaacaatggaagcagatgccaaggcagcagccatctcagctgcaagatcagaacaactatggcattcagtcacagggcggtcatagtccatg

SEQ ID NO: 13904 - DNA, 378 bp, Glycine max
  unsure at all n locations
agcttcagttntcaattattatcgtctttatatattacgggactcaatcagacatccgagtcaaaagttattgtcatttgacatttcatagagcttccattttcaattccgagcgtctcgatatattaaagggctcaatcggacattcgagttaaaagttattgtcgtttgatttttctaagagcttccgttttcaattccgagcgtctcgatatcctatgggacacaatcggacatccgattcaaaagttattgtcgtttgaatttgctcagagcttcacgtttcaattacgagcgtctggatatattacgggactcaatcagacatccgaataaatagtattgcatttgactttcatagagcttccgtttcaattt

SEQ ID NO: 13905 - DNA, 402 bp, Glycine max
  unsure at all n locations
acctgaggcatgcaagctngcattcctctcttcccttaaacttcntttatttatngctatnnatctntggctntaaagaagtttattatgaattgtcttttgagtaattcatgttaagggtgcattgttaatccgaaaagagagagtgaaagtttaattggggaatagtctttatatcttaattcaacccccctttttcttaaggtaactgaggctatntgtccaacatcctattcttgataactcacttctctctaaaaagacagactttccggaatgaggtcacatgaacgtcttgaaaacacagtcaatcaaatgctctttntttttaaatttatttatttttttaaccccttttttttatttggaacttatttgttttggactttactcngttgttta

SEQ ID NO: 13906 - DNA, 281 bp, Glycine max
  unsure at all n locations
actcacaacaataaggtataaatcatactaaaacttttgctctttgtgctcgtctaaaggcaattcacatttttctatcctttgttgctcatcatggcatgatgttgtatcaaatggacataaaaagcatattccttaatggacttatcaaggaagaagtcaatgtggaaaacccccctaggtttgagagttctatctaccttcatcatgttttcaaacttaacaaggctntgtatggtttaaaaccagttcctcgagcttggtatgaaaagttaagttca

SEQ ID NO: 13907 - DNA, 374 bp, Glycine max
  unsure at all n locations
agctngaatagatgaggattatcctaattatatgaatgtgctatcacgaaaaacttcttctgttgatgccagttaaggtcatgagggataatctcagctaccttgaagttagcaatggctagtaactcttgtttagtggtagcaaagttcatatgtgcatcattntggactttactggcatagtaaattgagtgaagcatcttatttgcctctgtcctagcactgcaccaacaacgtagtcactagcaccacacattatttcaaactcttggctccaatttggggccacaatcactgnggctgacaccagcctccctttcagggtgtgaaaggctagcatacattcttcatcaaacttaaacacaacatctttg

SEQ ID NO: 13908 - DNA, 446 bp, Glycine max
  unsure at all n locations
gtcacctgacgcatgcaagcttctaaactntgtcaataataaagttactgtttagaagtggcctcagaaatcttaaagctctgataccacttgttggacaagtggcctcagaaatcttaagaaggagggggttgaattaagaatttacaaactattcctgaattaaaatttctatatagattntgacccaagtcctaagattccttttaaaatgaatttctaaataataattcaaattaaacttactgaatagaaataataagcaacaataaataaaagagtttgagggaagagagaatgcaaacacagttttatactggtttggcaaagtccattgcttacgtccagtccccaagaaacccgcttgggagtccaatatctcacaaatccttacanattctgaaacacacaaggacaacccttcctttgtgttcagatgctttaca

SEQ ID NO: 13909 - DNA, 336 bp, Glycine max
  unsure at all n locations
agcttcaacatcagaccacttccagggttctggaactatcttacatggacttgatggggcctatgcaagttgaaagccttggaggaaagaggtatgcctatgttgttgtggatgatttctccagatttacctgngtcaactntatcagagagaaatcagacacctttgaagtattcaaagagttgagtctaagacttcaaagagaaaaagactgtgtcatcaagagaattaggagtgaccatggcagagagtttgaaaacaacaagtttactgaattctgcacatctgaaggcatcactcatgagttctctgcagccatcacaccacaacaaaatg

SEQ ID NO: 13910 - DNA, 360 bp, Glycine max
cactcggaagtctgattgagtcctgtaatatatcgtgacgctcgaattttaaaaccgaagctcgtagctaattcgaacgacaataacatttcactcggaagtcctattgagtcccgtaatatatcgagacgctcgaaatttaaaaccgaagctcgtagcaaattcgaacgacaataacatttcactcggaagtcctattgagtcccgtaatatatcgtgacgctcgaatattaaaaccgaagctcgtagcaaatttgaacgacaataacatttcactcggaagtcctattgagtcccgtaatatatcgtgacgctctgaaattaaaccaaagctcgtagcaattctaacgacaataacat

SEQ ID NO: 13911 - DNA, 234 bp, Glycine max
  unsure at all n locations
cttatgagccttanggtatattttgggcccatgggctaagtaccaacccacttatctttgtaaatattagattaaggtttcatattnttgggccttgtatttagggctccataatgtaggtagggtaccctaaaaatataggatttttcagcccttgtattttagggcacctagactagtttttgtattaagggtatgtttgtaatttcacatgcactaagtggatatttgatg

SEQ ID NO: 13912 - DNA, 315 bp, Glycine max
  unsure at all n locations
caataaaataaanaagataagggaagagagaattgcaaactcgatttatactggtttggccacttcccgtgcctacgtccaatcctcaagcaacccacttgagatttttcactatatctgtaaatcctttacagactttgaacaaaccttgngatccctcacccttgtgttcaagattctccaagagacaacccgtttcttgattacaattctcacaatccaagagacaactagtctcttgattacaactgactttntgagatgaacaaaanaatttttctcctttagagtggatgaatacaaattaagaatcta

SEQ ID NO: 13913 - DNA, 306 bp, Glycine max
  unsure at all n locations
ctctcnngcatagctaagatccaatggtcatcaattatggcttctttcaaattttaggttcaatcgaagaaacaataaccatattattgcacatatctttgagagagtgtctagttgttacccctttagatatatcaccgataatctcgtcaacaggatggtatctagaagtttccactctcttggaagacagcatttgttcttgttcatgaatgtgaaaatcttcatcattgtcctctcctttgcctttggatttcaccatgaatatgcatttcttctaagattctaanatatcatctagtatat

SEQ ID NO: 13914 - DNA, 381 bp, Glycine max
  unsure at all n locations
taagtcacctgcggcatgcaagcttctaactgaggcagccaacanaattaatgcaatataaagttctttcctgaagagacgaattttcttcgtcttcccagttntttttgacaattctagtttgcttagttcctcaatgcctgaatctgaggatgatctatgaagactattagatcgcattagaggctcagcttctttctcanaggcaaccaaatcagtctcagacgatcttcccaacttttttgtaaccacccactcgtaagaacttccaaagcgaagtaatccagatatcatggcattaaatttagttaccgacatagtgttctcaaatagaaggtaaggaactataaacggaaatgaccgtggagctggtagaacact

SEQ ID NO: 13915 - DNA, 237 bp, Glycine max
  unsure at all n locations
aagcttctctgctttctttcccaaggcttgttcccgtatcacaactntctcctccgcgtgagtgatttcagcctccttcttttccacttccaccaatttattcttcaatccatcttcaaaggattttctnttctcatccaattccacctcaaactcctgcttcttcacatcaagaaatagtatttgttcatcaagaagtttctgcatctcaacctgcatagtgtccaatctgaattc

SEQ ID NO: 13916 - DNA, 328 bp, Glycine max
  unsure at all n locations
attatatatnttcattacacttacttataattaagatgtaatcacatttatttgtaataattgttcgactttatcggtgtaattatgtctatacaatagtgttattacacacttcaagacatgtgttgtttttatttctatgattattatttaactaacaattttttcaatataaataatataatgtcaagttacagaataatatgtacaaattatcatcactaacttattatttatttctaacttactaaatatataatttgtaaatttatttaacttatttggtgagatttatatattaattatagttgataaaaagtacaaattt

SEQ ID NO: 13917 - DNA, 368 bp, Glycine max
  unsure at all n locations
agctntgacggcgacgacagttntatttaaactgatgttgagtattttatttcaacatcatttttgttaaaatcgtctttaaatagacgtttcaaagacggttttcacaaaaccgtatttgaaaagttgggattatttataaaaaagccacaacattntttaacacatcatttttgtagtagtgttataccggtataatttgattcctccttatataaataactactaattgaatacaatttcaaattattttagttattacttaattntgattgtaacgatattataatattgccacaaatcatatatctttatatatataanaggagataggtgaggtggtcatggaagaaaaacaaaataataat

SEQ ID NO: 13918 - DNA, 444 bp, Glycine max
  unsure at all n locations
ttgaccccgatcttaagtcacctgccgcatgcaagcttattctatgggaattaccaagcacacaatgatcattaaattcaagtttatctagtttatcaccacctaacagatnttgtttctcaagttcatgtaatcctctttcactaacatgacctaatctcaaatgccaaagttttgttttatcaatcaatgtattactagctaccgatgcatgtccaacaatggtggaaccttcaagaataaacaagccattacttttattcttgttacccttagctatgattaaagatccatttgaaatattaagaacaccatttaaaattctagttgaatatcctagatcatcaaacatgtttatggaaataatatttcttttgagttctggaatgtaccttacatttntcagtagatactctctattatcaaacatcttcaatctcacag

SEQ ID NO: 13919 - DNA, 185 bp, Glycine max
  unsure at all n locations
atctctcgagtcacctgcggcatgcaagcttaaatatatcgatacgctcgttattaacatttgatactctttttaaanncaaanagncataactnttcacacggatgtccgattcgggcgcataatatgtcgagaggctcgaaattgaacaacgcaagctcttgagaaattatactggtattact

SEQ ID NO: 13920 - DNA, 392 bp, Glycine max
  unsure at all n locations
tacttgacgatgctaattnttgttattatcccttatgagcatagcatctccaaatgaatntggtgaaggatttcttaagtaaaaaaataatttcttataaattttttttattggaataaatctatgtgacatgaagagttgttataaaataagaattttatctttcataaaatattatttcttaataataaaataatatttgtttaacacataacaacatcataattaagtgaaaataaaaaagatataaaaatgaatttttgaagtttcttattattgaaacaaaaatatatataaatttcttataatcatataacactctctagatcagaacaatattatataaactatataaaataacttaacaaatttatttaatacattctctatta

SEQ ID NO: 13921 - DNA, 400 bp, Glycine max
  unsure at all n locations
caatgatcaaacggttatcaaatntttatatcatagttntactaagacatgtntgagtgttcatganaaagagagggttttgaaaggcgggaaggaaaaacgaatttgagagcatgatagagcgtaaagacatatggtaaatgtaaaactgacctagtatatctctatttcgaactattatactctcaacctattatttactctatttttctttattatatnnatttataaaaataaactatattttactcccaatcaaatgaataaattaaatattcattttattttataagaacatataattatnttatttaccttaaaatcattattctaaataataaaaatatcttttcttatttattaattacgaaaatctattaatttcctaaaactctattta

SEQ ID NO: 13922 - DNA, 422 bp, Glycine max
  unsure at all n locations
gcttcggtattcactctcgatcgtctcgangnnatacttgtactcaatttatatctgtttaaaaacgttattgtcgtttggaattgctgagagcttctaacattcaattcgagcatctcgatatattacgggactcaatcagacatccgagtaaaaagttattgtccgttgaatgttctgagagcttcaacattcaatctcgagcgtctcgatgtattatgggactctatcagacatctgagtaaaaaagttattgtcgtttgaatttgctcagagcttcaacattcaatcttcagcgttttgatgttttacgggattcaatcagacatccagtaaaaagctatttgcgcttgaattagctttgagcttcacaacttaatttcgagcgtctcaatatatgactggactcaatcagacatctg

SEQ ID NO: 13923 - DNA, 417 bp, Glycine max
  unsure at all n locations
gctcctaaactntatacaagaatgaagctctgataccacttgtttgacaattggtctcagatatcnnaagaaggggggggtggaattaagatatcccaaactactctccacaattaaaaatttatttcactttcttttcaagttatagattcccttaacaatgaacttcctaaatattaattcaaataaaacaatntgaatatgaatgtaaagcaataataaacaaaggagggttacggaagaganagtgcaaactcagatttatattggttcggccacacccttgtgcctacgtgcagtccccaagcatatccgcttgagagttctactatcttgtaaatttcttttacaagttcttaacacacaaggacacatccttctttgtgttagaattctttacacaagagaccacagtct

SEQ ID NO: 13924 - DNA, 283 bp, Glycine max
  unsure at all n locations
agcttccattgttcaatttcgagcgtctcgatatattatgtctccttattctgacctccgagntaaaagttatgaccatttgaattgctcaagagcttccattgttcaatttcgagcgtctcgatatattatgcgcctgaatccgacctccgagtcacaagttatgaccatttgaatttctcaagagcttccattcttcaatttcgagcgtctcgatatattatgcgccccaatcggacctccgagttagaagttatgaccatttgaattgctcaaaagcttc

SEQ ID NO: 13925 - DNA, 306 bp, Glycine max
  unsure at all n locations
gctataatatatctatacgctcgaatataaacatttgnatactcnntcggaaatcanatagtcataactttttacacggatgtccgattcnggcgcataatatgtcgagaggctcgaatatgaacaacgcaagctcttgagaaattaaaatggtattactttttacaccggagctctcgtgaaagtcatatggtcataacttttcacactgatgtacgactgaagcttataatatatctatacgctcgaaanttaacatccgaaactctctataaagtcaaatggttataacgcttcacacggatg

SEQ ID NO: 13926 - DNA, 476 bp, Glycine max
  unsure at all n locations
tgcaagcttatctttgaaatacagggcatcattgccttatatagcaacggtttttacagaanaataacagaataaacttccatatggtatttggtcgcacccgaacatggatgcatttgaaagtagttcatgataggctaattntagatattcaaggacatcaagctaggtttacttcttcatcatggtctgacttggactcttctaatgttatgttagccatcatacaaaagttagcttcttcgctatcctcatccgacaatgtgtcgtctatgtcttcccaagtactcataagctcattcttatctttagaattgataaataataacgagagagattattaatggatagtggtctcataaaaatttttattcctgaattattagtggtatatatatatctttaaataaaaatatttcattaatattatattanataaacattttctgtaaaaaatatatatcataaaaattaat

SEQ ID NO: 13927 - DNA, 178 bp, Glycine max
  unsure at all n locations
actaagtngactcgttagaatgagaagtttgttcggaatgagaagtgtgagcaaagtttccaagagttgaagaggcggttgacgacagctcctatgttaattttgcccgaccctaagagaacatttgaagtgtattgcgatgcaagctggcaatgctatgggtgtgtgttgatgcata

SEQ ID NO: 13928 - DNA, 281 bp, Glycine max
  unsure at all n locations
agcttctanagatgtacttaaccaggtccatcttgtttataaccaggtggatggctcagcatgtattgtcttagacggtgggacgcccagactaaagcacaacacgttctttcgagcaaggagtagttcatttcataagccgtgaactttntactcaagtagtagacagcgcgttctctcttnccggactcgtcatgttgccccaacatacatccaatcgactcattccaaatcattatatacaagatgagaggccttcctggtaccaacgacataagcac

SEQ ID NO: 13929 - DNA, 198 bp, Glycine max
agcttataataaatcgatacgctcgattttaaacatcttattctctctataaattcaaatggccataacttttcacacggatgtctgattctggcgcataatatgtcgagaggctcgaaattgaacaatggaagctcttgaaaaattccaatagtcataatgttttcacactgatgtccgattcatgcttattatata

SEQ ID NO: 13930 - DNA, 421 bp, Glycine max
  unsure at all n locations
atgggacaatnggctacccaattgtatcaacaacaatcctagaattctgacaagctaccttctcaagctgtccaaaatcccaaaaatgtcagtgccatttcattgaggtcgggaaagcaatgtaaaggacctcaacccgtagcaccttcctcatctgcaaatgaacctgccaaacttcactctattccagataaaggtgatgacaaaaanttacctaacaatttctgtgcaggtgaatcttcttccacaggtaattctgatttgcagaagcagcacattcccccgcttccattccctccaagagcagtttccaacaaaaaaatggaagaggcagagaaagagatcttggaaacgtttagaaaagtagaggtaaacatacctctgtnggatgcaataaagcaaatctcagatatgccaaatc

SEQ ID NO: 13931 - DNA, 212 bp, Glycine max
  unsure at all n locations
gcatgggagatcctgaataccgctcatgaatgaacctccaaagagaagatgtccagattgcaactattggccacanaattcgaaaatctgaagatgaaggaggaagagtgtattcatgacttccacatgaacattcttgaaattgccaatgcttgcactgccttgtgagatagaatgacagatgacaagctggtgagagagatcctcagatc

SEQ ID NO: 13932 - DNA, 261 bp, Glycine max
  unsure at all n locations
ctgtcgcagactctgtgggttatgctgctntgccgaccaccacacagacctttgcccttctgtgcaatcaattgaagcaatngaacagcttgaagcttatgctgcatacatctacaatagacctcctcaacctcagcagcaaaatcagccacaacagaacaattatgacctctccagcaacaggtacaatcccaggtggaggaatcatcccaaacttagatgggcgagtccttcacaacaacagcaacaacaacaacctta

SEQ ID NO: 13933 - DNA, 229 bp, Glycine max
  unsure at all n locations
caacggaagctctcagagaatgtanatggctcataactttaactcggaggtccgattcaggcggataatatatcgagacgctccaaatngaacaatggaagctgttgagcaattcaaatggtcataaatagtcactcggaggtccgantcatgcacataatatatcgagacgctcgaaattgaacaacggaagctctcataaaatcaaatggcataactttaactcgga

SEQ ID NO: 13934 - DNA, 208 bp, Glycine max
  unsure at all n locations
atactcagcccattaagacagcttcggtgctacactacaatgggaaaatgaaaccttggcttgatctgngaattccacagtataaaagctattggaagaagtttctgaacaaagaggatcagctcttaagtgattgcaatgtaaatntcataataagtngtgntcctgtggtgcatgtttgggaaattgtanggctgatctcttaaac

SEQ ID NO: 13935 - DNA, 249 bp, Glycine max
  unsure at all n locations
gtgactcgtaagaatgagaagtttggttggaatgagaagtgtgagcacagtttccaagagttgaagaggcggttgacgacagctccagtgttaattntgcccgaccctaagagaacatttgaagtgtattgcgatgcaagcgggcaaggcttgtggtgtgtgttgatgcaagagggaagagtagtggcgtatgcttcacatcaattacgtcctcatngaagtaactatccgactcatgacttggaacta

SEQ ID NO: 13936 - DNA, 451 bp, Glycine max
  unsure at all n locations
agctngcactagccagtgatggaatgaatccatatgtgaatttaagcacttaacacaattcatggccaattctactagtaatttacaattttcctccttggttgtgcatgcagtgaaaatacatgatgttgtcgatgatgatatcaggcccaagacagccaggaaatgacattgatgtttatctaagtccgttgattgaaggcctgagaaagctgtgggacgagggggttttagtgtttgatgggtttcanaatgagacttttctaatgcatgcaatgcttttttgtacaattaatgactttccagcatatatgaatttgagcagttacagtgttaagggtcatcatgcatgccccatctgtgaagaagacacaagctacatacaactganacatggtagaaaaacagtctacactaggcatcgacattttctaaaacctcatcaccctta

SEQ ID NO: 13937 - DNA, 439 bp, Glycine max
  unsure at all n locations
agcttcacacaatnnnattttcttatacttgagttttggatgaccaattntgaggtacttcctaactagattatttagatgatgcatgttaatgtgtgcagtcctacgatgccacaaccaagaatcatctattgtacttaccaaacaaatcaactcatgaaatgatgcatgttcaacatttaacatatatatatatatatatatatatatatatatatatatattacctattatctttcaatgtggaaaactttacatggcttcacttataagacaaataatttttgttgaattcaattttgaagcctttgtcacaaatttgactaatgcttaggaggttatgctttattccatccacatatagaacattctttatttgagtnttgtgttgatttccgatatttctcttccattatttttcatggtattatctacaaac

SEQ ID NO: 13938 - DNA, 466 bp, Glycine max
  unsure at all n locations
agcttagcccaagaggggattgtccttttttatgcaatcctatgccgcaagggcattggatagaagaccccaagtagaatgggccaaagatgcaagagaaggccctagggttcttatgagccttagggtagattttgggcccatgggctaagtacgagcccacttatctttgtaaatattaaattaaggtttcattatttttgggccttgtatttagggctccataatgtaggtagggtaccctagaaatataggatttttcagcccttgtattttaaggcacctagactagtttttgtattaggggtagttttgtaatttcacatgcactaagtggatatttgatgtgtgtggttggaaataaatntaattgaattggcagaagcccaatccaattaaattttagagagggaggtgagcatttgcttactacaccccatttgcacatcatatagtcacactttgt

SEQ ID NO: 13939 - DNA, 452 bp, Glycine max
  unsure at all n locations
ttctccactaagttgcctaatgcctgttatgtcttctctaatggcaatggtcctagatgcacggaagaatttttccatgaacaccctattaaggtcatcccagctgaaaatagacctgngagcaaggtagtatagccaatcttttaccactcccttcagagaatgaggaaaagcctttagaaagtcatgatcttcttggacatcagggggcttcatggtggaacaaacaatatggaactccttaagatgtttatgaggatcttcacctgcaagagcatgaaacttgngctgcaaatgtattagtccagtcttgagaacatatggaacaccctcatcagaatattgaatgcacaagctctcataagtgaaatcaggtgcagccatctncctaagaatcctctcacgaagtggagggtgatccatgttctcagtataaaaattagtagtggaat

SEQ ID NO: 13940 - DNA, 428 bp, Glycine max
  unsure at all n locations
agctggaaccaatattnttcaatctctattccttcattaactaattgattagcaatacaagcactactttttgagcaaaacaacttacagcaaaaataatacactttatctaaatcctttgaatacactagccattttttatcatatttttctccatatggcattactttttggtagtaaaatgaagaaaaatgtctattattttcatcttttggatactgcatatcattatatctaattggatcataaatattnttagaaacttcatttgatgtactattgagctccttatttgtttctaaacaatcttcttataaatnttcattatcctcttgttcttgactaggattaagactattcatattgttaagaatttctatctctagaaattntcattatcagtattntgctctaccgtattaatatta

SEQ ID NO: 13941 - DNA, 332 bp, Glycine max
ctctctgaatccactgtattgctaggtttatataatgtgtattcattaatggtgcattcaaatctctattgtatctattaattattcatttaataaatcataatcccttttaaacaactaatgttttgaccagtcaagcacgtttacatctttgtaatgcatatataaaaaagtatttgtttgagttgctatacatatttttgaagaattaaattaataaaatatagaatataaataattttcacaaaggtaaattaaaaattttagtttttaattataggtaatataaaactgtaattgtaataaaaaaatgcttttgaaatacatattca

SEQ ID NO: 13942 - DNA, 346 bp, Glycine max
tcaagcttgatgcaacatttggagaggttattgaaacaacgagatgatgcgctccatgagaggttggatcaaatggagaatagagatcataatgaagaagaaaggaggagaagagggaatgatagtgttcctagacaaaaccgaattgatggtattaaactcaacattcctccatttaaaggaaagaatgatccggaggcctacgttgagtgggagatgaaaatagagcatgttttctcatgcaacaactatgaggaggaccagaaggtgaagcttgccgccacggagttttccgactatgctcttgtgtggtggaacaagctacaaaaggagagagcaagaaatg

SEQ ID NO: 13943 - DNA, 381 bp, Glycine max
  unsure at all n locations
caacggaagctctcgttaaaattttgttgtcataaacnttcacacagatgtccgattcggggaaataatatatcgagacgcacgaaattgaacaacggaagctctcgagaaatttgaatggtcataacatttcactcggatgttcgattcggggacataatttatcgagacgctcgaaattgaacaaccgaagctctcgacaaattagaatggtcgtaacttttcacgcgaatgttcgattcggggacataactcatctagacgctcgaaattgaacaacggaagctctcgagaaattcgaatggtcataagttttcacacggatgtccgattcggggacataatatatcaagacgctcgatattgaacaacggaagctct

SEQ ID NO: 13944 - DNA, 342 bp, Glycine max
agctggaccttatctcacatggatgttatctatgtattcttgaatgggaccatctaagaagacatttacattgctcaaccatatatggttttgtgcatcctaatcacagcccaaccatgtttgccacttgaataaagccctttacttacaatgcttttatatcatttctcttggcttatggcttcaccaatgtcaaatctgacacttcacttttttatttataaaaatgatcatgttatggctattttcttgtgtatgtagatgatttgcgacttacaggaaacaagtttctcggtgactttcaacaactagctgtttccaacaacttttcacttaaaaatc

SEQ ID NO: 13945 - DNA, 457 bp, Glycine max
  unsure at all n locations
ttcccccacanagtcttataaaatgacttaagaacttataatccctattcgtcacaatgcttttgggcagtccatgaaggcacaccacctctctaaagaacaagtcttttaccacacaatcatcatccactttatggtaaggaatgaagtgagccatctttgagaacctatctaccacaacaaaaatagagtccttgcctctcttggaccttggaaaaccaagtacaaaatccatggatatgtcagtccaaggagatgtggggataggcaaaagggtatacaaaccatggcttatgaccttagatttagctctatgacatacaatgcatttgacaaaatatttattaacattatgtttcattntttgccaaaagaaatgatcatgcaaaatgcctaaagtcttgtaaaccctaacccatncaacctcctcatgggcttctctaatcaacaattcatg

SEQ ID NO: 13946 - DNA, 462 bp, Glycine max
  unsure at all n locations
gatgttgagagtgtntgtcttanatcactatctctatttgaagtcccctctttcaaaaaaatagaacatttaaaattgagattgatgtgatagaaaaaaagtgttttgccactatagtaaacaatgaagagtggttatggcattacagagttggccatttaaattttagagatctgattcagctaaactcaagagaaatggtgttgggtttgcctcagatcaagcctcctagtgaagtatgtgatggttgtttacagtgtaagcaatcaagaaccactttcaaacaaaatgtaccaatcanggcaaaggagaaacttgaagtgatttactctgatgtgtgtggccctatgcagactgaatctcttggtggaaacaaatacttcatatcctttattgatgaattgaccaggaaagtatgggtttatctaataagaaagaagagtgatgtctttgaagtctttg

SEQ ID NO: 13947 - DNA, 414 bp, Glycine max
  unsure at all n locations
ctccgcttcagctgagctntgggaaaaggctaacctttatgatttcttcttgagacaaaagtccagaagcaaatggattaagaaggaggacagcaacacgaattatttccacaaattgattaatcacagcaggagaagaaataacttgagagggttgacaattgacaactcttgggtggaagatcctaacctcattaaggctgaaatccttcagcattttcagagaagatttcatgaatcccagctgcatagacctaacttggatggagtctctttcaatgttttaacccatactcagagggatacattggttgaaccttttaaagaagaggangtgcgatgtgctgtgtggagttgtgggaatgacaaaagcccggggccagatggcttcaatttcagaattattaaacactt

SEQ ID NO: 13948 - DNA, 315 bp, Glycine max
  unsure at all n locations
gctctcgngaaattcaaatggttataacttttcacacggatgtccgattatggcgaatcacatatcgagacgctcaaaattgaacaacggaagctcttgagaaattcaaatggtcataacttttcacaccgatgtccgattcaggcgaatcacatatcgagacgctcaaaattgaactacggaagctcttgcgaaattcaaatggtcataacttttcactcagatgtctgattcaggcgcatcacatatagaggcgctcgaaaaggaacaacggaatctctcgagaaattcaaatggtcataacttttcacactg

SEQ ID NO: 13949 - DNA, 398 bp, Glycine max
  unsure at all n locations
agcttccgctgttcaatancatttctttttgatatatnatgcgcctgagtcggacatcggagtgaaaagttatgaccattggatatctcgagagcttctgtctttcaatttcgagcatgttggtatattatgtcccagaatcggacattcatgtgaaaagttatgacaatttgaatttctcgagagcttctgttgttcaattttatgtgtctcgatatgttatgcgtctgaatcggatatccgtgtgaaatgttatgaccatttgaatatcttgagagcttccgttctttgattccgagcgtcctagtatattatctccccaaatcgaacatccatgtgaaaagttatgagcatttgatttttagagagctgtcattttcaattcgagcgtctcgata

SEQ ID NO: 13950 - DNA, 432 bp, Glycine max
  unsure at all n locations
tagtaaagctaagcactaacaatatgttcaagtgcatattcagattcaatgcatgaagagtgacaggcatgcagattanaatgaagatcagtcatgtattcatcaacaatatggtcaattatttcaacacgaaatacagaaagatcttcagatgggtgtttcatagcatcaagaatattaaaatgaacagttatatcaccaaactccatagatagtgtgcatgcatatacatctatcttagttctagcagttttcataaaaggtctgcctacaatgatgggaactgatcctttagaatatccctcctccatattcaaaatataaaaatcaacaaggaaaatcagctcaccaactctaactaggacatcctctatgaaaccagcaggataagcaacacttctattagctaaatgaattatcacatcagctgac

SEQ ID NO: 13951 - DNA, 402 bp, Glycine max
  unsure at all n locations
aaaactacgcttctatccaagctatcttgtggtgaagcttcacttctatggcttattccttaatggatggcgcctcctctcacctcgttttctttgtcttccgctgcatctccatggtggaaaatcaccattaaaggaccccattgaagctcaaagatccagccctcatagaagccccacaagcaagctttcatcaagtggtaatcagagcacaagagctgcaaattgccatatatggaattggaaggaggattggtgccatcccttgaagaatttgagtcaagaagcacggagccaaccaccttatgagctattggactaagaagcactccacattgngtgaatcaccaaagagagaaataccaccacaattgaggaccttgttgcaatattgtaattgac

SEQ ID NO: 13952 - DNA, 379 bp, Glycine max
  unsure at all n locations
acactgcaactcgagcttttggtgatccagcacttgcaattccattgccgaagccaaatacactagctccaggaacaaagttaccacctgcgggtgataaagtatgtgaaccagctacgttcatagtcacgtacactaagctctgaggcattcagttttgtacctgcatttgcctcataacctttgtagaaatatcttgctccaataagcttcctacatatagtaaaaacgtcaatttaattcaaatatcaaagacctttaaaacttaatggaatttctcatgatgcaagttaattcaaatgcctaccgaaacatctatntataactgaagctgatactaatngaactaatattaacacgtaaagaatgattacctacc

SEQ ID NO: 13953 - DNA, 429 bp, Glycine max
  unsure at all n locations
agtttcttgtgatttcactttataatatatcctccaatattctgttctacttttaaagatttagtactgtacatttttgaaagaatgcattatgttttgcagatatgtggaaattgggttagagtcagggcttcctgtttcagtcaatggtaagagtctttcaccagcgtctttacttgctgagctcaatgagattggtggaaggcatggaattggccggatcgacatggttgagaatcggcttgtaggtatgaaaagccgtggagtttatgaaactcctgcgggaacaatcctgtttgctgcagcacgtgagttggagtcattgacacttgatcgtgaaacaatacaagtcatagattcattagcccttanatatgcagaggtagtgtatgctggcagaatggttgatccgcttccggagtccatgga

SEQ ID NO: 13954 - DNA, 400 bp, Glycine max
acagcttctgttatgaatttcgagtgtctcgatatactacgggtcactttcggacatccgagtaaaaagttattgacatttgaatttgctcatagcattcgctggcaaataccaacgtctagatatattaaaagattcattccgacatccgagtaaaaaagcattatctttttattttgctcagagcttctgttttcaatttcgagcatctcgatatattacaggactcaatcggatatccgagtcaaaaagtattgtcgtttggatttgctacgagctttcgggttcaattacgagcgtctcaatatgctacgggacacaatcggacatccgaataaaaagtattgtcgtgtgaattactcagagctttcggcgcaattacgagcgtctcgaatattac

SEQ ID NO: 13955 - DNA, 346 bp, Glycine max
  unsure at all n locations
tcacaatttcctcactcataattggtctgccaccacttctgtatgccattgggttggtgtcacttgtgatgcttaccatggaagggtaaggacattgaatcttggcgacatgtctcttagtggcaccatgccctctcacttgggaaaccttaccttccttaataaacttgaccttggcggaaacaaattccatggtcagttgccagaggaattagtccaattgcataggttgaagtttctcaacttgagctacaatgaatntagtggaaatgtttcagaatggattggaggattatctacactcagatatttaaaccttggaaataatgactntggtnnggttttt

SEQ ID NO: 13956 - DNA, 373 bp, Glycine max
atctatcgctcctaatatggagcccttctcaatcaccctcattaagaactagcttttttcttcctctattgcctttacttgaatacacctttgttgggatctctatttggctcttaactctctcatgaaacttcttcacaaactctgacctagattccccttctttatgtataaaagaagtgtccactgggaggggaatgaagtcaaactgtgttaagggattaaacccataaacaacctcaaaaggggactacatgaggaagatactcatcccaagacttatggttgcctttcacaagagctcttataaaagtggatgaagacctattcactaccactatttgccaatcagattgtggatgacaagtggtag

SEQ ID NO: 13957 - DNA, 414 bp, Glycine max
  unsure at all n locations
ngtagtactaccacaaagaaagaanacaatcagcgcttaatgggtgtttataaacaagctacatgaggcaggtaagattgtgagaaataaggcaagactattttccaagggttattcacaattggaaggtatatattatacagaaaccttggcccctattgctcgtctagaggcaatacacattttactctcatttgtagctcatacaaaaatgagactatatcaaatggacgtaaaaagtgcattccttaatggactgatacaagaggaagtctatgtagaacaacccccggtgtttgagagtaacatatntgcacaccatgtatttaaactctgtaaaacattgtatggacttaagcaagctcctaaagcttgatatgaatgtcttaggtcatttcttttacacaatgactt

SEQ ID NO: 13958 - DNA, 434 bp, Glycine max
  unsure at all n locations
taagctgctagcattttctggttcaatcattttagaattagcttgatattttccctgatgaaaaggtggactgattttgtcttaaattaagtggcctgctgtgataactgatactccaagtctcatcgttctgactagtgagagcaagacatctagtatgccattcagtatgtttgaaatgtgaatgccaagtgcataaaatctgtattgattgttacttatatccatagggtaacaagagaagtgctgggtttacagatgaagagaggaaatcatttgcaaagaacttcttatctaggggatttgtagatacctttagaaggcagcatcctggtgttattggatatacatattgnggttaccgtcatggtggacgcaagttaacagaggtatttctagcacactcttaaaaatnngattatatataatttact

SEQ ID NO: 13959 - DNA, 460 bp, Glycine max
  unsure at all n locations
tcttacaagagactaagannattttgatgtaaaatttttagtataaagatcttggggaaacctcttttgtattagaaattaagatactaagagatcgctctcaaggtatcctaaggttgtcacaagagagttatatcgataaggtcctagatagattcagcatgaaaaatagtaaaccaggagataccccaatagctaaaggagacaaatttagtctcaaacaatgccctaataatgaccttgaaagaacaaagatgcaaaagatcccttatgcataagtagtaagaagtctaatgtacgctcaagtttgcactcgtgccgatataacatttgtagtaggaagtttgggcagatatttgagtaatcctggaatgcagcattgganagaagcnnaacntctgattcngtacctanagagaacanaaggatacatgctcacttatcagaagtctaaattttg

SEQ ID NO: 13960 - DNA, 418 bp, Glycine max
  unsure at all n locations
agcttgtttaccccatgttgtattngcttacaatagagntgntcatagcaccactaattgttctccttttgaagttgtttatggttttaacccactaactcctcttgatcttttgcctatgcctaatgtttctgtttttaagcataaagaaggtcaagcaaaggcggactatgtgaagaagcttcatgagagagtcaaagatcaaattgagaggaaaaataaaagctatgctaaacaagccaacaaagggagaaagaaggttgtctttgaacccggagattgggtttgggtgcacatgagaaaagaaaggtttccagaacaaaggaaatcaaagcttcaaccaaggggagatggaccatttcaagtgcttgaaagaatcaatgacaatgcttacaaaagtgagctgcccggtgagtat

SEQ ID NO: 13961 - DNA, 339 bp, Glycine max
aaattcaaatttcaagtctgaagaatcacaactctttaaaaactacctgtgtaattgaataccacatttatgtaatcgattagcagtaaagaattttcgaaaataacccccaagaatcacaattggtcaagaatttttgaatggccatcaaatgcctttaaataggtgacttgggatacgaaattccttagagtttttctgaacaacattatcttatcctctcaaaaccaaattatcttatcactatcaaaatattccttggccaaaacacttgcaaattcaataaggaatcatgatcgatattcaattgtaatatccttatcttaaagagagaaaatt

SEQ ID NO: 13962 - DNA, 450 bp, Glycine max
aatggtcgacaatggaatataaactgcggcagttattgtcgttttacctactccaccaagcccatggatccccagcatgtggatgacatcatcagatccaacatccagaagttcttttacttcttgcatacgtgactcaagtccaactggataatccgcaacatgtaaaggagcacgattaatcttcttagagaccaactcaacaatcctctgaataaacttatattcgtattcttccctattcaatcagagaaatcagagaaaagtcaaacaaaactagtcatcctccatatcttgatatgtatgtatgctgttcaaggtaataaactttattcatccctctaaatttcaacattatgtttaattattaatcttggctctatattggtctacacctttatgttttgacctatacgcaaaaaatgtatgtttagctctagacagcatatt

SEQ ID NO: 13963 - DNA, 445 bp, Glycine max
  unsure at all n locations
gtcacctgcggcatgcagcttgagcaattcaatgtctttnattttttactcagatgtccgaatgagtcccataatatatcgagatgctcgaaattgaattcgtaatctcctaaccaattcaaacgacaataactttttactaagaagtctgattgagtcacgtaatatatcgagacgctcgaaattgaatacaaaagctctgtgcaaattcaaatgacaataactttttacttggatgtccgattgagtcccgtaatattttgagatgctctaaattgaaaatggaagctcctagaaaactcaaacaacaataactttctactcggatgtctgattgagtcccgtaatatatcgagacgttcaaaattgaatacggaagctcctagtaaattcaaaccacaataacctttgactcggatgtttgatngagtcccgtaatatatcg

SEQ ID NO: 13964 - DNA, 378 bp, Glycine max
  unsure at all n locations
ngagaatggagaattgcactaagcaattattacgcatatctttttactcgaaggtggaggacacatgaacgaaaacacaattcatggggctccgaaaaaggggttgagaatggagaattacactaagcaatcactacgcatagctccaaactcgaaggtggaggacacatgaacgataacgcaattcatggggctccgaaaagattgataatggagaattgcactacgcaatcactacgcatagctccaaactcgaaggtggaggacacatgaatgaaaacgctattcatggggctccgaanagattgagaatggagaattgcactaagcaatcactacgcatagctccaaactcgaatgtggaggacacatgaatga

SEQ ID NO: 13965 - DNA, 227 bp, Glycine max
cttgggccagccacatcaaaagtgttagatttcaacttaaaactaattggcactaaatgaaagtgtccaacagatatataagctgtatcccaaaaattgaggcaggtgatgtgggacttcctaacccccccctccacaaatgcctgccaatacaagcaagcctacaagaataggcaagaactaagatgggctataggctctgatatcatgttagatttcaacttaaa

SEQ ID NO: 13966 - DNA, 443 bp, Glycine max
  unsure at all n locations
tgtatggtagaaggggtaggacacctctatgttggtttatgccctgagaagacctcaccttangacttgaagtggtacaacaaaccaccgagaaggtcaagttgatccaagaaaggatgaggactgctcagagtatgtagaaaagttatcaggataagaggaggaaagacttggaattcgaggttggtgatcatgtattcttgagagtcactctgtggactggggttggtcgagcattgaaatcccaaaaactaacacctcgcctcatcggtcctttccaaattcttaaaagagtcggtcctgtggcataccaaattgcattacccccatcacattctaatcttcacaatgtctttcatgtgtatcaactccataagtatatccatgatccatctcatgtggtcgaattggatgacgtacaagtaaagagaacttgacatatg

SEQ ID NO: 13967 - DNA, 308 bp, Glycine max
  unsure at all n locations
acaaaaaactgaccaaaacctatcttctcctttttggaccaaatatggcaaggtgggggccaagaaattttcttcccatcaaaccctggatgcaactgtgatcgtatgcccatatcaactagatcttgacgggtattcaagccatccttcgtcttgccttgaatgttaaggagcgtcccaatcacactgtcacaaacattnttctccacatgcataacatcaatacgatgtctaacgtcaagaatcaaaccagtaagaagatcaaagaanatggacctcttcttccatatgcaactcttacttttatc

SEQ ID NO: 13968 - DNA, 472 bp, Glycine max
  unsure at all n locations
gatccttaagcacctgcngctgcagctatagtcattactgttaaactttaactcaagnngaatgttcctttgatatagtaaataatttgttttgtggccttgagatgagtaatggttggagtctccatgtattgactgatgagtcgagtaccatataaaatgtctggtcttgtggacgtcaaatatcacaaactacccaccaaactcttgaaatttgtagcacccatcttttttgcttcgtcaaactttgataacttcattttgcactccaccggtattccaattggcttgcatagttttgctatgaaatgaagattcaatcttccttttgctttacctcaataccaagatagtatgacattagtccaatatcggtcatcttgaactccttgaccattgctttcttgaacttttcanacatacttggattacttcccatgaagatcaagttatccacatatatgaacatgat

SEQ ID NO: 13969 - DNA, 369 bp, Glycine max
agcttcataaatccatcactttttatgttctatgcacaaaaacttaaatgatgttaatttaacaattatttgctcaaaaaggaaaaagtaggagggaaaaattacaaattcctatataatttatgatgcaatactaccccgcaagggcattgggtaaaaaactccaagtagattgggctagagatccaagggaaggccctagggttctcatgagccttagggtagatttcgagcccatgggctaagtatgagcccgcttatctttgtaaatattagaataggtttttccttcgtctgggccttgtattttggccattctagtagtatagggatttagccttgtatttcaaggcattttgagtagtcttt

SEQ ID NO: 13970 - DNA, 460 bp, Glycine max
  unsure at all n locations
tctntgaganaacttccttgagaagctagagcttagttacacacacccctctcataactaagctcacctccttgagaagcttccttaagaagattcctaaagaagcttgagcttagctacacatacctctctaatagctaagctcacctccttgagatgagaagctagagcttagctacacaccccctataatagctaagctcacccccatgacaaaaaacatgaaaataccaaaaaaagtccttactacaaagactactcaaaattccccgaaatacaaggctaaaaccctatactactaaaatggccaaaatacaaggcccagacgaaggaaataactattctaatatttacaaagataagtgggctcatacttagcccatgggctcgaaatttaccctatggctcatgagaaccctagggccttcccttggatctctagccaatctacttggagtct

SEQ ID NO: 13971 - DNA, 455 bp, Glycine max
  unsure at all n locations
ctgcagcttacagcaatgcacttctcatttttcaaacgatatgttgacaagaaaacacaagtatattcactangaaaacatttgtgtggaaggaaattgtagtgctgtgattcaaaagatccttccacctaagcataaagaccctgggagtgtaaccattccttgttcaattggagaagtcactatgggaaaggctcttattgatctgggagccaatattaacttaatgccactctccatgtgcaaaaggttgggagagttggagatcatgcccactangatgactttacaacttgttgactgctccattaccagaccatatggagtaattaaagatgtgctggtcagagtaaaacattntatcttcctagcagactttgcggtaatggatatctatgaagataatgacattcctgtaatatggggaacgccattcatgttaactatgagctaca

SEQ ID NO: 13972 - DNA, 420 bp, Glycine max
  unsure at all n locations
cgaatgttgctagaaattgcaatttatgggcaagcctatactctaatatactgcaagcagggatttttgcttttttgtctagtttgcttcaactcgattttaggtgtggtgcattttccgtttgaactatacatatcgcaaataaattgaccaagactcattattgtaaaggttttttcacaataattatggtggagaaaatgccaattcaaatagaatgtccatgattttgactaggctaacaagttttgacagggaatcaagtcctgttatgttaatgaaatgaacttgcagaaatttgaacctctcaacagatggagaataagtgtataattgctttagtcactgttgatgttgatcancgtctttagaactacnntctttcttatctattaatntcaagtttgaaatgatacatat

SEQ ID NO: 13973 - DNA, 420 bp, Glycine max
  unsure at all n locations
acaaagcaccctacggcctcatgtgctaaaactnttagctgggagcaccatgacactaccaagcctttctctgacttcttttcgaagtttttagggagtttagtctcttcagaagctctaaccacccacaagaagtaactttcactatctcttaaaccataagctagttcttctatttgctcctcactaagtattgccatactcccaaaagaaacataaataacagactcttttatcttatcatctaaccattttatgcattcttcacttgtgaatngtgcaacaccatagtcttcatcatcttgggtttgcttgtctaanaacatggatggaatggatggtcctatnngtcctaaatttggccagatcttcatcgtccaatcagccacctacaagcaaaataagtaatgtcacattcta

SEQ ID NO: 13974 - DNA, 214 bp, Glycine max
  unsure at all n locations
gctgcaccctcaattgattattactatctgtgcatcacctctacttatatcaattgcataattctacgacggtctttcaaacagaggattatcttatnttaataaatatatccaatcaatcccaatccttttaccgattaacatcttgtaagatnttcacaaatccctaccttttaattttcgactttctcaaaatatatcagctgatgaatta

SEQ ID NO: 13975 - DNA, 470 bp, Glycine max
  unsure at all n locations
gtacgctaaagatattatgaatgcttcaactgagcgtatgngtttgaagaaaatgtgcacaatgtncattggctttcttttataggatcgtggcctcataatccctaaacaatgtgcacatgagtaatttgctctcaagcccattatacatttaaccctaaacaatgagtatataaacttaaaaaaatagaatctaatttccatatatggctatggtannnaaaatatttatcaacgaagtgaanactataataaatataactgataagataattattataaaaataaatgaaataattatacataccaatttgtgataaaaaataatgtgaattcttttacanaataatatattgctacttctcttaaagtatggcttcattaactgatagaaatctacattaacagttatttacacgacaaataaattagactattctgcacattgcgcttatggtcaaacactacta

SEQ ID NO: 13976 - DNA, 251 bp, Glycine max
  unsure at all n locations
tatatcgagacgcacganattgaacaacggaagctctcgagaaattcgaatggtcataacatttcactcngatgttcgatccggngacataatntatcgagacgctcgannatgacaaccgaagctctcgacannatatgaatggtcgtaactnttcacgcgaatgttcgattngngacataatcatctagacgctcgatatgacaacggaagcttcagaaatttaatggtcatacgtttcacacggatgt

SEQ ID NO: 13977 - DNA, 196 bp, Glycine max
  unsure at all n locations
tcataatgatcattgngatgtagtaattcgaattttgaaatacattaaaaggacctcaggacaaggactactctatgaagacaaangagacacttcaaatagtggattttgcgatgcagattggacataatcacccattgataggcgttccacttcaggatattgtgtgtctggtggaggaaatcttgtctcatgg

SEQ ID NO: 13978 - DNA, 269 bp, Glycine max
  unsure at all n locations
tcttcttcatcaatggagtcctntgcttcttgaatatcaatggtagtggaatggagaaggaagaaagattattggagacacgaattcaaggagaagatgagtcaagaacaagctcaccaccataggaagccatggataatagcttgaaggtaggagaagatgagtggagggaggaggagagaaggagcacgannatttatgcctcanatgaggtctgaactntgaagtgtaattctcanatgatcaaagttgaanaaaattgcacacat

SEQ ID NO: 13979 - DNA, 346 bp, Glycine max
  unsure at all n locations
ctataaatctatctaagaaccctgttcggcactcaagaacccaacacatagaaatangacatcatttcttgagagaatatgttcaaaagggagattgtgttctagaattcggtgatacaaagaatcaagtagctgatatctttaccaaacctctccataaagaaacgttctttgctattagaagagaantanngtctttagatatcaatgatctagacaagtaggtaactcattgagctntgtcctcttatgttcatatantggcttgagtgtagtgtagcgttataatagtcatataattgttgttggctttaataatggnccttgataccttgttgaatataat

SEQ ID NO: 13980 - DNA, 368 bp, Glycine max
  unsure at all n locations
cttgagaggcttctttgagaagctaacactttatctactaacacccntttaataactaaactcacatccttgaaaataattacggataaaataacataacaaatataatcaaacatcaaacataattactaataatatatagatatatatcagggtgttacaactctcccaccctttttgaaatttcgtcctcaaaatttacctgactcaaacaaggatggatgagcttctcgtatctgactctctaattcccacgtggcatcttctcctgatgcacctccccagatcaccttgaccaacagaatctttntccctcttaagtgttttgttcacctatcctcaatcctcagaggcaatgtttcatatgt

SEQ ID NO: 13981 - DNA, 355 bp, Glycine max
  unsure at all n locations
taataaatctatatatggtttaaaacaagctccttgtcagtggtactttaagtttcatgggataatttctttatttggttntaatgaaaaccccatggatcaatgcatataccacaaggtcagtaggagtaaaatatgttttcttgttttatatgtagatgatattttacttgtagtcaatgatcggngtttgctacatgaggtgaaacaatttctctctaagaantttgacatgaaggatatangtgatgcatcttatgtcatcgacattaagattcatagagatagatctcgaggtattttgggtctatcacaagaaacctatattaacaaaattctagagagatttcagatg

SEQ ID NO: 13982 - DNA, 399 bp, Glycine max
  unsure at all n locations
caccatccattttaagatgtatgcataattntcaaaataacagaggcagcaccttagcagctccagtgctgctgggaattatattgaaggaagcagctcttccacccctccagtccttgtttgatggaccatcaacagtcttctgagtagctgattcatcacaaaaagtatataatgaataccatatcttcatctaaaattgaaaaggataatagattaattcaagaagttatatagccaaatgacaaacctgtgatggcatgaacagtggtcataagaccctccacaattccaaatcggtcgttgataacctgtacaaaattaaaatntaataatttcattaagaaaaatgcaaatttataatacagatggaagcagcaatatataaatatatcacaa

SEQ ID NO: 13983 - DNA, 336 bp, Glycine max
  unsure at all n locations
cgtagggttaaagtctncacgatgtcacgtgctcatgcaacaattgttagccatggctatacgagacatcttgccaaacaaagttaggttagcgataactcgcatgtgctntttcttccatgctatatgtagcaaagtcattgatcctatcaagtttgatgagttggaaaatgaggccgcaattatactgtgccagttggagatgtattttccccctgctttatttgacatcatgaatcacttgattgtgtatctggtcagagaaatcaaatgttgtggtcctatttatctacggtggatgtaccccgttgagcgatacatgaagatcttaaaagg

SEQ ID NO: 13984 - DNA, 380 bp, Glycine max
  unsure at all n locations
tctagagtagtataatgtagtcggctatgatactttttaatatcttgcctccaatactaaatgccgattcataagctacagcggagatcggaatatctaacacatcccttgcaatagctagtagtgttggatacattagctcgttcaatttccaccacattaagatatcagaatctgaatttcttggtgaaacttcatcctctaagtaatgatccaacttcgttttcatagttgaggttcttgccctttctttctttcaatgtatctatcataatcacacaatttactctttccatcactaaccacatctagtgattcaaaagaactagtagaatctggatgctttttggcttgatattccgaaatanaatcataacaca

SEQ ID NO: 13985 - DNA, 248 bp, Glycine max
tccctatgttatcacacatatcaagggaaaacgtaatattgtagttgatgctctttctcggcgtcatgccttactttctatgcttgaaacacaattgattggtcctgaatgtttgaaaagcatgtatgaaaatgatgaaacttttggagaaatctttaaaaactgtgaaaattcttcagaaaatggtttccttatacatgaaggctttcttttcaaagaaaacaaattgtgtgtgcctcaatgttcta

SEQ ID NO: 13986 - DNA, 261 bp, Glycine max
  unsure at all n locations
cgccgcgaaggtatagtacgatgatccttgtgtgcggcgcagcttttctgcgggtgctgcgcgtggngtgttttcttcacaggattgtttgcgaagaaagtgtacgtggaggagaattacagagttggaaggccgttcggggctctgatgggtggcggaaggaggctgctggcggcgcacgtgattcacatattggtggtgtgcgggtgggttactgtgaccatggcgccgttggtctatgtgcttcatatgatgaaactg

SEQ ID NO: 13987 - DNA, 468 bp, Glycine max
  unsure at all n locations
ttgtatacactatgacacgtatattttattaactcatcccttataattatatttgaaggacaaaacttatagtatccagtaagtgcttatagtgttctccaattaaatgttagagtttcatctcagtaatttctttaataaatgtttgcatacaaattacgaagatgaaactctaattatgattagagaacaaaataaaacatacctatagaaattctttcacacacaaacttaatgccattcaatagaacacaaaaagtctagatatggtggcttatctaacatcctcaacatgtctcttagcttgttcaataatctctgaaaacactttgtaattgttcttgtgaatgaaaaggttgcctgtntcgggtggctgaagactatgaagagttctctgttatgttgccactatgcttctctccgttgtctgcatagtctctttgtagtgatggtagtctttcataaata

SEQ ID NO: 13988 - DNA, 472 bp, Glycine max
  unsure at all n locations
tatagaaggttcgttcctaatttctctacaatngcatcacctctcatatgagctggtgaagattattgtggcatttacctgnggtgaaaaacaagagcaagcctntgctttgctcanagaaaagcttactaaggcacctgttctagctcttcctgacttttctaaaacttttgagctagaatgtgatgcctctggagtgggagttggagctgtattgttacaaggtgggcaccctatngctttatttagtgagaaacttcatagtgccaccctcaactaccccacctatgataaagagctntatgccttaataagagccctccaaacttgggaacattaccttgtttccaaggaatttgtcattcatagtgatcatcaatcacttaagtacattagagggcaaagcaagttaaacaagaggcatngcaaatgggtagagtacctagagcaatttccatatgttatcaaatac

SEQ ID NO: 13989 - DNA, 385 bp, Glycine max
  unsure at all n locations
gcaagctntcgcactctcttcttcttctaatctccgnctatttaaaccgtttctgtgtgcatttgagcatcgngttcggcgcactcgagcatcgtcacaagtctctgcttcttctccttcgctaccatacctagggattgttcgtctcttgtagtgcttaactctactgagctttaaaagattggctaagattttggtaaaacataagcacttaaacaatgaaggaaagctggagttgctgcacatgatgtccaacgttatgtcaaggaataagatcgggctgcacaatgcacaaggcaagataaaatgtcaaatgaagaattgaagttgcaggatccaccatgtcggatacaatgtcctgacatcctgcccgagaatactggcg

SEQ ID NO: 13990 - DNA, 354 bp, Glycine max
cgcacaagccccgagccaattctaacgataataactttttactcggatggccgaaatagatctgtaatatatcgacacgctcgaaactgaatgatgaagctctaagcctattcaaacaacaataacgtgttactcggatgtccgattcagagacgtaatatatcgagacggtcgaaattgattgctgaacctatgtgccaatttaaacgacaataactatgtactcggatgtctgattgagtcccatcatatatcgagacgctcaaaattgaatgttgaccctctgagccaattcaaacgacaataactttttactcggatgtctgaatgagtctcgtaatatatcgagacgct

SEQ ID NO: 13991 - DNA, 449 bp, Glycine max
  unsure at all n locations
ttccttggaagctaggtgctgtgaacaaacttctattgaaacagcttgttcaacccttgttttaacaagggcactagagaaaccagcttctctcatgaccctactaatgctagggtcatcaaggatagagactatgagctgctccatctcaatcttcaaggccagaatgggttgctgctggttctcaatcgaaccgcggcgttggtgagcctgagcacgcttgaaggctgcaaccaaagcatnggaaagtgagggagtggtggaatatggaggactcacaagagggcttggtgtgggtgctggcaaacggttgatggaaacattgaagcaaagttctagtgccttgtattggagagggtgagagtggcattgaacgaaaacattgcggagaaggcctgtggaagtagcaagcatgacagtggcaatgtgaagaggggcacttgagcatg

SEQ ID NO: 13992 - DNA, 365 bp, Glycine max
ctatgctgcatagtgttacaatagacctactctacctcagcagcaaaatctaccacagccgaacaattatgacctctccagcaacagatacaaccctggatggaggaatcacgcttatctcagatggtccagccctcagcaacaacaacaacagcctgctccttccttacaaaatgctgctggcccaagcagaccatacattcctccaccaatccaacaacaacaacaaccccataaacaaccaaccattgaggcccttccacaaccttgcatcgaagaacttgtgaggcaaatgactatgcagaacatgcatgttcagcaagagaccagagccttcattcagagcttaaccaatcagatgggac

SEQ ID NO: 13993 - DNA, 345 bp, Glycine max
  unsure at all n locations
agcttgaccttcggcaaggcattcaccatatacgtattgtcgacgaggacatcccgaanatggattntcgtactcaccatggacattntaagtataaagtcatgtcgttcggactctgtaatgcccccttcgacatttcaggcgactatgcatgatcatgttagaccatttcttcgcanaattgtcgtggtctttnttgacgacatctttgtcttcagctcatcactttcaaaccacctcaaccacttggaagttgtccttaaaaatctatatcagggccaattatttctatgccattctaagtgtttgtttactcataacaacttacactacctaaggcatatt

SEQ ID NO: 13994 - DNA, 366 bp, Glycine max
  unsure at all n locations
gcttctgatttcaatttcgatcgtcttgatctnatactgtactcaatctgacatccgagttaaaagttattgcggtttgcattggctacgagcttccgctttcaactacgagcgtctcgatatattactggactcaatcgaacatcggagtaaaaagttattgtcgttagaatttgttcagtgctttcgctttcaatttggagtgtctcaatatattacgggactcaatcgaacatccgagtaaaaagttatcgtcgntagaatttgctcatagactttgtttgaatttgctacgagctttcgttttcaatgtggagcgtctcaatatattacgggactcaattggacatccgagtaaaaagttat

SEQ ID NO: 13995 - DNA, 427 bp, Glycine max
  unsure at all n locations
tgatgatgtcgagaagacatcacatgtntgtcatcatcaaaaaggtggagaatgtgaatgtatgtatacatgatnttgatgatgtcaaagaagaatcaaacaaggctgcttcaaatgataagcatttgcttcaacaaacaaagccttgtttcaagattcactaaagaccaagccttgccttataacagagtgctttcaagatatgcaaggctctggtaatcgattaccagaagacagggttgagaaatagctgttgaaaaagatntatgaatttgaatttcaacatgtaatcgattaccagcaacgaaactcctgaaattcaaatcaaaagtcatgactcttcaaattataactgtgtaatcgattactcanacattgtaatcgattaccaggtgaaaagttttcagaaaatatgctaacagtcaca

SEQ ID NO: 13996 - DNA, 280 bp, Glycine max
gatagatgaccatttgctgagcatagttttttaaaagcttgtctgaagccactctttatgttaaacatcagagcaatgaagttccgatgatttcactttatgtcgatgatcttttggcgacaggaaataatccagggatgattcaggaattcaaacaagaaatgatgaaggtttttgagatgacagatctcgggttaatgaccttctttcttggatttgaaataagcaggctgagtatgaagtcttcatctgccagaagaagtatgtcaaggaaattttg

SEQ ID NO: 13997 - DNA, 349 bp, Glycine max
acatggtctgatggggcctatgcaagttgaaagccttggaggaaagaggtatgcctatgtttgtgtggatgatttctccagaattacctgtgtcaactttatcagagagaaatcagacacctttgaagtattcaaagagttgagtctaagacttcaaagagaaaaagactgtgtcatcaagagaattatgagtgaccatggcagacagtttgaaaacagcaagtttactgaattctgcacatctgaaggcatcactcatgagttctctgcagccattacaccacaacataatggcatagttgaaaggaaatacacgactttgcaagaagctgctgggtcatgcttcatg

SEQ ID NO: 13998 - DNA, 364 bp, Glycine max
  unsure at all n locations
gcttgtgtcgcactttcaactgccgattctgaatatttttctgtaagaagntggggggctcaaagtctttggatgaagcaatgacttgaagactctggagtaattcttaatcatattcctatgaaatgtgataacacaagtgctattaatctaaccaagaatcctgtcatgcattctagaactaagcacatagaaataaggtatcattttctaagagatcatgtgtccaaaggtgactactactttgagttcattgatagtgaacataattagcagacattttcacttaaccttttgttagagatagattctctcatattagaaatgaactacgcatattggatgcatctagcatagaataaca

SEQ ID NO: 13999 - DNA, 409 bp, Glycine max
  unsure at all n locations
tcgagcanaatcagtccacgaaggaggcatatttgatatcatgaaatctccaagcataatgtcaggcaaaacgattcctttcaatttcatgtcatagacaatgttttgaaattcatggatctgatctgaaatagattntccatcaatcatttgaaactcaatcattttttcacaagagtaacgacttaaacctttgtcagcagatccatatttcaattcaagtgcttcccataactcaacagaagntttggtatggcaaacaatcttatatatgttatcagccaaagcacttaaaatgcgtccatgacataaaatatctntatcaganacatcatgcttaatggttgcatcagtttgaactatatcagtagaggaagtgaagttttatttctctttagaaatacagagt

SEQ ID NO: 14000 - DNA, 346 bp, Glycine max
cgtaatcgatatcacatatacctgaatcgattaccagagcagattttcataacatattatcaacagtcacatctttttatgtggctcttgaatggctatcagaggcctatatatatgtgactcgagacacgaatttgctaagagttctttagaacaaaaaggtcttatcctcttaaaaagtaaaatcgttctatcctcttacaaattccttggccaaattacttgtgattcaataaggaattatttgaattctcaaattgttcaatctatctctctcaagagagatttcttcttttcttcttcttcattctgaaaagggattaagagaccgagggtctctgtgtgt

SEQ ID NO: 14001 - DNA, 265 bp, Glycine max
ttatgaccatttaagcaacatatacaatccaggatggaggaatcatccaaaatatgagatggacaagtcctccacaacaacaacaacctattccttctttccagaatattgttggtccaagcaagccatatgttcctccttcaatgcagcaacagcagcaacagtcacaacagagacaacaaagcattagatgagttagtgaggaaaatgacaatccagaatatgcaatttcagcaagagacaagagcctctattcagagtctga

SEQ ID NO: 14002 - DNA, 459 bp, Glycine max
  unsure at all n locations
ctgaatggaggctctggtctcttgttgaatctgcatgntttgcatattcatttgcctcacaagttcttcaagggaaggttgcggaggagcctcaactgtttgctgttttggggctgttgctgttgtttttgttgctactggattggtggaggaacgtatgctctgcttgggccagcaactttctgaaaataanggtgctgttgttgttgttgttgctgctgttgtgaaggaattgaccatctaaggttgngatgattcctccacccaagattgtacctgttgctggagaggtcataattgttctgttgtggctgcttttgctgctgaggttgaggaggtctgttgtagatgtttgcagcataagcttcaggctgttcaattgcttcagattgttgcacagaagggcaaaggtttgtatggtggcccacagaggagcatanaccacagagtctggcgata

SEQ ID NO: 14003 - DNA, 399 bp, Glycine max
  unsure at all n locations
cagttgcatgaaccacacatgatgactcattaattcaatggtttatgttatatttntttttcttccattntctttcttagataaactcaaagtaaaaaagaaaacttttatctgtttctgggacaccctnttttgagtaaagttgtttgtacctctttctaaccactttatttttcagcattggaagtctagggaaagacaactcaacaggcatagtcacgaaagtgatcttggatacagcagttcttagggagactaccaacggtctcagaattaagacttggcaggtagtatctcaatcttgatgaaaattatcttaatctttcaataaatatataatgtcattattctagtttttatcattattatcccttggtgaaagaatatgtcacacccctt

SEQ ID NO: 14004 - DNA, 241 bp, Glycine max
  unsure at all n locations
ctgcatctgacaaagatgatggcaaatcttcttcangatatgcnctctctgtaaatggnggngcattcagttggaaaagttccaagcaagctacggtagcagattcaactactgaagcagaatatatagcggcaagtgaagccgctaaagaagttgtctggattaataagttcatatatgaacttggtgtggttccttcaatagaagagtcnggcccattattgtgcgacaataatggggc

SEQ ID NO: 14005 - DNA, 224 bp, Glycine max
caatcaaattaaatcttagagggggaggtgagaatttgcttactatttcccattgccacatcatatagtcacactttgtgcatgtacttcatgctttacatgcctcatgacacctaagcacacttagtggagaatcttggaattgatcctggatcattgggctgaaccataactaaaattcactaatcataattagtgaaatcttggctccaaagtttggctcc

SEQ ID NO: 14006 - DNA, 264 bp, Glycine max
  unsure at all n locations
ttggatagttaagccttattctaggccatacagacttcagtggcttagtgaagataaagaggtaanagtgactcagcaggttgaggtgtgtctcaccatggaagatataatgatagggtgttgtgtgatgtgcgtccaatggaggcgactcatatactgttgggaagaccatggcaatataacaccaaagcagtgcatgatggcttcaccaacaagaattctttccagcaccatgaccagaagaatattcttaaacctctaccc

SEQ ID NO: 14007 - DNA, 327 bp, Glycine max
  unsure at all n locations
gagttccagtgcacattcgtcttcttcttgtgtccagtcttcttctgatcttcattcatagtgnngcttccttctatgtccagcatcttgggatgttcccagcctttgatgacagctntccaggttctgctatccagtgatntgaggaaggccaccatccttgctttccagtattcatagttggttccatccagaattggtggtctgttcactggtcctccttctttctccatgttcatcagaaattatctccctagatctcactcagtgacttcgagtgcccgctctgataccaattgaaattctgatactggggacagatgtcgt

SEQ ID NO: 14008 - DNA, 186 bp, Glycine max
  unsure at all n locations
gtactatcangccaagaagatattgtgtatgatgggtatggaatattacaagaatcatgcttgtccgaatgattgcatactgtacagacatgaatttaagatatgtgcaaatgccctatgtgtgttgtatcacattacanagtgaaggatgatgactactgtaatagtgatgaaaactcaaagaac

SEQ ID NO: 14009 - DNA, 252 bp, Glycine max
  unsure at all n locations
tttggtcagagcttcaacattcaatttacagcgtctcgatatattacgggactcaatcagacatccgagtaaaaagttattctcgtttcaatttgctctgaggttcagaattgaatttcgagcgtctagatatattacgggactcaatcanacgtcctagtaaaaacttattatcgtttgaattagctcagaacctcanaatttcaatttgatcgtctcgatatattacgggactcaatcatacatctgagt

SEQ ID NO: 14010 - DNA, 222 bp, Glycine max
  unsure at all n locations
tcattcagcttgaagagaatgtcatganacactgtatataccagaaggtcagtgggagtaagaattgtttccttgtattatacgtagataatattctacttgccggctaatgaaagggtatgttatatgaagtgaaacaatttctctcanagaattttgatatgaaggatatangagaggcatcttatgtcatangcatanagatccatagagaaagatctc

SEQ ID NO: 14011 - DNA, 274 bp, Glycine max
  unsure at all n locations
tcttattcctctccatagttcataataagtctntttaatcaatggtcccatctatattatgttttgaacatagcangctatgtttaccgcttctccctagaangttttaggaaagtgagtttcacaaagcatggtcctagccatttcttgcagaagtttatnntttcctttcaactacccgatttgttgaggtgttctcggtgaagagaagttaaggaagataccattctnttcatagaatgatttanactcaacattctcaaactcaatttca

SEQ ID NO: 14012 - DNA, 336 bp, Glycine max
atgaaatgtgagaaatgttgatataaagatttttggattagattatttatatatctaataattacatatatattaaacttaatttctttttgtaaatgtacttattccccctgcatttgcttcatttagtattactaatcatctatgtaaattaatttagatatgaaataaataaagataccagatatgctacctatttctttccagatcactatgtagagtcacctcgttatcaatgaccatgctgataggaagtaaatccgatgatgaaaaatgaacaggacatatgtcatctaaatatttatatataaagaattatctgacaaaaaatactta

SEQ ID NO: 14013 - DNA, 212 bp, Glycine max
  unsure at all n locations
ggagacccattgaccagcactaatataaatgatgatctcagacactcagctatccaacatacccattntacatagaagcccatatgctctagcatgtagaggaggaactcccagctcactgagtcatatgctttcttatagtctagcttagagactaagcatcttttcttacatctccttgcttcatcaatagcctcattagcaacaacact

SEQ ID NO: 14014 - DNA, 235 bp, Glycine max
  unsure at all n locations
cagttgaatattcctgtgttccctgtatgccttctcatcaaaattcagaaaatttagagcccaatatgctgtgtgttccatttcaactcggaaatgacatgattctccatacaccagttgataaggagataagccaatcggggtcttgtatgaagttctgtaagcccacagtgcatcttccaatntggttgaccaatcttttctagttgacgccactgttntctctaatatcttc

SEQ ID NO: 14015 - DNA, 248 bp, Glycine max
  unsure at all n locations
ctctcgagaaatccaatgctcattatctntaactcggatgtctganttangcgcataatatatcaagacgctcgaaatngaacaacggaagctctctagaaattgaaatggtcataacttttcactccgagggtcgantcaagtgcatgatatatccagacgcctcgaaatgaacaatagaagctctcgagaaattcanatggtcataacctttaacttcgaggtccgattatgcccataatatatcg

SEQ ID NO: 14016 - DNA, 114 bp, Glycine max
  unsure at all n locations
gatacagcangggagaatctaacacantttcctctgacanacactntgtgatactcatcactctttctgtctgtatgtcagagggaatgttgacaatgaattccctgactagac

SEQ ID NO: 14017 - DNA, 202 bp, Glycine max
  unsure at all n locations
tcatcacttgcgggaatggattcgtgtggaggacccctcantatntgagacagcccacggaacaagtgcttggtggcttcttgagaaanaccctgaatatnttggtctcttcaatgaggctatggcaagtgattcccgaatagtatacttggcactcanaaatagcacttcagttattgaggcgctagattccatggtggat

SEQ ID NO: 14018 - DNA, 206 bp, Glycine max
  unsure at all n locations
tgcatggagtggctgaaagaatggcagaaactcccttatacttcaccttacatcaatgcctctcattnggatccccgtactgatgtatctgagagaaagatagtnggagtcttccatgagctccttcatctcacactccataagcanactgagcgcaagaacgttagcaacttgcgtagacccttggccctacctcatgaagttac

SEQ ID NO: 14019 - DNA, 417 bp, Glycine max
  unsure at all n locations
ggtgttattgaagaacatgcttcctgaacataacacattgccgaaaaatcactacgaggaaaaaaaagattttgtgtccagtaggaatggagtacaggaagatccatgcatgccctaatgattgcatattgtatagaaataagtatgcaaaactacggcaatgccccacgtgtggggtatcacgatacaaagtgtagtctgacgaattaactgatgatgcaagaaccaaaaattgtcgtcctgcaaaggtttgctggtatcttccaatcataccaaggtttaagcgattgcttgctaatagacatgattcanaanacctttcatggcattcagtggacagaaaaagtgatggcttactacgacatcctaccgattcttcataatggaagacaattgattgtttgtatccagagttta

SEQ ID NO: 14020 - DNA, 370 bp, Glycine max
actaagcttcaatggtcaccgcttcattcttgtggcaatagattacttctatcaatgggtcgaagcggcttcttatactaacgtcacgagaagtgtggtggtcagattcataaagagggagctgatttgtcgatacggactccctaggaagatcattactaacaatggcaccaatctgaaaacaaaatgatgcaggaaatgtgcgaggatttcaagatccagcatcataactgcaccccttattggccaaagatgaatggggttgtataagctgcaaataataatattaagaagattgttcagaagatgacggtgtcatacaaagattggcatgagatgttgcctttcgccctgcacggatatagaacct

SEQ ID NO: 14021 - DNA, 415 bp, Glycine max
  unsure at all n locations
taagcttacttactcccatacttctaccatgtgtaaaagtgttgttttcttcattctgccacaccattctgatccggagaactatgcatagtgtactgggtaataatcccatgttcttgaagaaatgttgcaaatggacctggtgcttgtccatcctcggtgtatctaccatagtactctccacctctatctgatctcacgatcttaatttgttttccacattgtttctcaacttcagccttaaaaactttaaagacatctaaagcttcattcttataatgaaggaagtagagagacatatatcttgaatgatcgtctataaaggttatgaagtcattcagactatgtgcattcatgtctggacaacatatgtctgtatgtatgatntctaataaattagaacttctttttgcac

SEQ ID NO: 14022 - DNA, 371 bp, Glycine max
  unsure at all n locations
atgatgttantttatgggaagtgaaagatggacctcaaggttctctcattccatgattaatcttatattgttataacacttgctataaaatttgttaagatgttattgttgctgctattattattactaaatttgaatggattgatatgttgatatggaatgaacatcatgatgaacttctacaaatttgcatgaacttgtatgtatgcctatgaacaagatgaacataagaggaattaaaaatatctagccctttgatctttatgcgggatgtgactttagctactaatgctagtacttacttattttaattattattattataactataatgagaatatttatttgaagacaaaaatggtctttatata

SEQ ID NO: 14023 - DNA, 424 bp, Glycine max
  unsure at all n locations
agctntgcaactnnttgtccctggctcttttgtcaggattcaaactattcctatactggacgagtccaaccaaccaatcccaaacaaggtcatattccatcgacttttttggtcatttaaggcatgcattgatgtgtttgcattttgtaaacccattgtgcaaatcgatggaacatggctatatggaagatacaaaaggacattgttagttgcaattggacaagatggtgctaataacatatttccattggcatttgccattgtcgagggtgagatagcagatgggtagcactttttttttgcaaaacttgatagcacatatgacaccacaacatggtatatgcttaatctctgacaggcacgattcaatcaaaagtgcatacagatgacttgacagtgggtggacagcagacaactacatgtg

SEQ ID NO: 14024 - DNA, 409 bp, Glycine max
tgaaggagaactggatgccatggttaacttggtaacctagctggccttgaatcagaaatttgtatctgtcgcaagggtttgtggtttgtgctcctctgctgaccaccatacagacctttgcccttccatgcagcaacctggagcaattgagcagcctgaagcttatgctgcaaatatttacaatagacctcctcaacctcagcagcaaaatcaacctcagcagaacaattatgacctctgcagcaacacatacaaccctggatggaggaatcaccctaacctcagatggtccagccctcatcaacaacaacagcagcctgctccttccttccaaaatgctgctggcccaagcagaccatacattccttcaccaatccaacaacagcaacaaccccagaaacatccaaca

SEQ ID NO: 14025 - DNA, 400 bp, Glycine max
  unsure at all n locations
agcttaacaaaaggcatgcgatatgggttgttttcctagagcaattcccttatgttatcaaacataaaaagggaaaagggtatattgtagccgatgctctttctcggcgtcatgcattactttctatgcttgaaacaaaattgattggtcttgaatgtttgaaaagcatgtatgaaaatgatgaaacttttggagaaatatttaaaaattgtgaaaaattatcagaaaatggtttctttagacatgaaggctntcttttcaaagaaaacaaattgtgtgtgcctaaatgttctactagaaattttcttgtttgtgaagcacatgaaggaggtttaatggcgcattctggggtccataagactctataaacattacaagaacgattttattggcctcatat

SEQ ID NO: 14026 - DNA, 381 bp, Glycine max
tgatggaaaaggaggtgttagagaaagctggagtctatgtgttatgcccatcgttctggtaaatagaaatttatcttaacttataacgcgtttggtagggaagaatttgaaagcttggaagcaatgcctactccatgctgaattttcttataataaggtattaagctgtactacttattctccttttgaggtagtttacgggttctagtccactgccctttcttaatttgttaccttggcctaacacttctgctttgatgaatacgaatgggctttctaaagccaattttgtaaagaggttgcatgatatagggaaaacacaatttgagaataagaatgaacaatatgctggatattccaataaggcgagaaagacaatga

SEQ ID NO: 14027 - DNA, 252 bp, Glycine max
cggaagctctcttgataatctagtggtcataaattttcacacagatgtccgattcggggaaataatatatcgagacgcacgaaattgaacaacggaagctctcgagaaatttgaatggtcataacatttcactcggatgttcgatccggggacataatttatcgagacgctgcgaaatgaacaaccgaagctctctacaaattagaatgggcgtaacttctcacgcgaatgttccatttcgggacataactt

SEQ ID NO: 14028 - DNA, 336 bp, Glycine max
  unsure at all n locations
tctatggtctatngtcttctgcagatcaccatacagatctctgtccttctttgcagaaatctggagtcaatgagcaacctgaagcttatgctgcaaacatttataatagacctcctcagcagcaaaaccaacaatagcagaataattatgacctttcgagcaataaatacaatctaggttagaggaatcatccatatctaagatggacaagtcctccacaacaacaacaacatgtccctccgttccagaatgctgctggtccaagcaagccatatgttcctcctccaatacagcagcaacaacaacatctgtcacaacaaagacaacaagcaactg

SEQ ID NO: 14029 - DNA, 411 bp, Glycine max
  unsure at all n locations
cttgatatattttatggacttatgggcactatgaacgacaaattccttgggataaaggtagtgttgccatgttttcaaagcccatactaaggcatacaattgttcttctctaagcacagtcaagacagattttaaataatcaatatgcaaatcaagtgaagcgctatagataagaatatcataaaagtacaccacaacgaactttcctatgaactctctcaagatatggttcattagtctcatgaaagtgctatgagcgttagttaggccaaaatgcataaccaaccattcatacaaaccatattttgtttaaaagcagtttccattcatccncttctctaacctaattgattgatccacttttaaatcgatgtagagaagtacatgcatcatgaattcatcaagcaatca

SEQ ID NO: 14030 - DNA, 442 bp, Glycine max
  unsure at all n locations
actacgctgatctgaactgatctgatcctgaatcaatttcctgttgaaccttgaagtgttcttgattcaatcttgaactcattctttgattcttgagatcatcatctctgctatcatgaagtgttcttgacctttgagctntttttcatcacctttgttatcatcaaaacttctttgaatcaatcttgattcatcataaatcttgcttctacaagatggatactgttgcttcaagaatttgatttagtcatcaatgacaagaaaggttctgaaaatgtggtagcagaccacccatccatattggtgaatgaagatgtcacttcaaaagaggctgaaataagagataaatttcctgatgaatctttgtttttgatcgcaaggagaccctggttcactgatatggctaatttcaatgcggaaggtgtcataccaaaagatctaa

SEQ ID NO: 14031 - DNA, 408 bp, Glycine max
  unsure at all n locations
agctngctcgtcttgctgatnattatcatgtctacttttctgangatgaccgaggaacaattagggatcaacttgaaacttatgtgcttcaagtgagaagaaatgcttctttttccacttgtgaagatgttcaaagtttggctatgaagatggttcaaactgagaaacatttggtatttccattggtttataaacttattgagctagctttgatattgccggtgtcgacagcatccgttgaaagagctttttcagcaatgaagattatcaagtctaaattgcgcaataagatcaacgatgtgtggttcaatgacttgatggtatgttacaccgagcgggagatattcaagtcgcttgatgatattgatattattcgaacacttaccgcanagaagtctcggaaaggac

SEQ ID NO: 14032 - DNA, 412 bp, Glycine max
  unsure at all n locations
agcttcacanaagnntatatggcttgaattttgcaccgagggagnggtacaagaagtttaatgagtttatgagcaactcaggattcaaaagatgtgacatggaccattgctgctatngtaaaaaatatactaatagttatgttatccttgtcgtgtatgttgatgacatgttgattgcaggatctagtatggcagaaattaacaggttgaagcagcagttggcagaaaactttgaaatgaaggatcttggtccagctaaacaaatccttggtatgagaattcttagaaacagatcaaaaggaattttgaagttgtctcaggagaaatatatacacaagttgtttgacaagttttaccttgaagattctaagaccaggaatacccctttgggatcttatttgaaagtttcaag

SEQ ID NO: 14033 - DNA, 386 bp, Glycine max
  unsure at all n locations
taaattttgagaacaaaaaaaaacaatcaaaaataaaaattgttaccttaactccctcttcctctatttctaattatccaagttttttacttattcatgcatagttnttttactgaagtgtattattataagtatttatataactatttttttaattaaaattagagttttactgtggtaaagtgttcaatttttattgtctttattgtgcgagttactaagtgaaactctaattttagtttaaaaacattagaaaaaacatttaaggtactactcttacgttttataaaaaaataaatagaatagattntggcatatattatgaaatacaaaacaatacttagtcgataaattntaaatagacaaaaagtaatcaattcacctaa

SEQ ID NO: 14034 - DNA, 412 bp, Glycine max
  unsure at all n locations
gagtatgtaaaactcagatattgcactatgaacagtgttaaaattctgatgtcattctttctgaattatcagaatagtttatggtttgcaaattgcttgtaggaacaatgttttgaaggaccaaagatctaaaaccctcaaacaacagagagaggaaaaacggaaagctgatgaagctagtggagatactaaagcatggaatagtctgttcatgcgtcctgatacagtatgttcttgaaacttgataaatngcaaacccttattctagtatttcagtttttggtgaatagctgagtagtcaacagtaaattaaaattctgaattatgcttatcaatatcttaacttttcaaataaaataacaaccttttcttattagttntcagcttttccccaatatggtgcttgcccatg

SEQ ID NO: 14035 - DNA, 159 bp, Glycine max
taactcttcacactggtgtccgattcatgctcatcatgtatctggacactctaaattaaatcattctgaaactctcgagaaattcaaatggtcataacatttcacactgatttgcgattcgggggcataatacgtctagaggctcgaaattgaacaacg

SEQ ID NO: 14036 - DNA, 429 bp, Glycine max
  unsure at all n locations
aaacataagagatgagttcaattgtatatttgaattgtttgtgaaatttttttgacaagtcaaaactttgtctaagacagaagaaatgaacttttaaaaagattcatcctaaggtgaatatataaataattgggtctagctgggaggaacacaatttataaaatacttaagcaaaaatctttttgataacttacaaactgtacaattaaatctctcttttaattagggttaagtttaagacgattcaaccttatgttaatgataacaacaaagaaaaataataaaaataaaacacaattagccaacattatgtattcaaattgaattgattcttaaaataccccacatgtttatttttaaatntaccaatatcgcttaccgtacaatactatatcaatgtatgtatgaaacaaccatgtnanaatcaca

SEQ ID NO: 14037 - DNA, 392 bp, Glycine max
  unsure at all n locations
ttaagtcatcagagtcacctcccctatgccaacaatcttgcttgtgacaaggttgcccgtcttcactgtaccaaaatcccctttntgatatgacgagaaaaatccttcataagtagtaacatggaaggatgctctagattcaattatccatgtaaaataattagatgcaatatttaaataatattcattaccaataagaaaaacattctcatcgcctgatgtcacaacagtagtggttctaccttcattcttcttcttttggtcaatttgattagcatggacagttctagtcttctaacctctcttcaagaatctgcactcaaactttntatggcttgaatttccacagtagtagcaactcaagcctttggggtgagacttggatctttctc

SEQ ID NO: 14038 - DNA, 431 bp, Glycine max
  unsure at all n locations
accgggacatgtggatcgtgtgggtngatggatcatcaaacgttctagggcatggcattggagcagtattggtctctctagacaatcaatgtatacctttcatatccgggctggggtttgactgcaccaacaatatggttgagtatgaagcgtgcgccctggccatccaggcggcaattgactccaatgtcaagctactcatggtgtacggtgactcagcactggtgatccaccagctgagaggggaatgggaaactatagaccccatgttgataccctaccaagcctatatcaatgaaatggctggttcctttgatgagatcttcttgcatcactgttcccgagaggaaaataaaatggctgatgcgctcgccactttggcgtccatgttccaactaacaccgcacgacgacctaccgtacattgagttc

SEQ ID NO: 14039 - DNA, 318 bp, Glycine max
actgaatcagacatcagagtaaaaagttattgtcgtttgaattatctcagagcttcggtattccagtccgagcgtctcgatatattacggcgctcaatcagacaaccgagtaaaaaagttattgtcgtttgaatttgctcaaggcttcggaaatcaatttcgagcgtctcaatatattacggtactcagtcagacaaccgagtaacaatttattgtagtttgaagttgctcagagcttcggcattcaagtcctagcgtctcgatatactacgggactcaatcagacatccgagcaaaaagttattgtcgtttgaattt

SEQ ID NO: 14040 - DNA, 318 bp, Glycine max
ctatatgagacatcttgtctaacaaatgcacgttaacgagaactcgcctgtgctttttcttccatgctataggtatcaaagtcattgatccaatcatgtttgatgatcgggaaaatgaggcctgtaatatactgtgccacgtggagatgtagtttccccctgctttctttgacatcatgactgacttgagggtgcatctggtcagataaatcatatgttgtgggcctgtatatctacgggggatgtactcggttgagcgatacatgaagatcttaacatggtatacagagaatttataatgcacacaaacacccattg

SEQ ID NO: 14041 - DNA, 394 bp, Glycine max
  unsure at all n locations
acacttcttatgttggttagagctcggagaaagcctcaccttatgaccgaaagtggtacaacaaaccaccgagaaagtttatttaatccaggaaaggtgaggactgctcaaagtangcaaaaaatttatcatgataagaggaggaaagatctggaattcgaggttagtgatcatgtattcttgagagtcactccatggactggggttggtcaagcattgaaatcccgaaaactcacctcgctttattggtcctttccaaattcttaagagagttggccctatggcatacgaaattgcattacccccatctctttctaatcttcacaatgtctttcatgtgtttcaacttcctaagtatatttatgatccatcccatgtgattgaatnggatgat

SEQ ID NO: 14042 - DNA, 446 bp, Glycine max
  unsure at all n locations
tcttactcccttgacattcactgaaggaggtagcttgtcaatcacatcaatcttagctntgtctactacaatccccctcacagagattatgtggcccaatacaattccttcttgaaccataaaatgacatttttcccaattaagcactatgttggtctcttcacatcgttgcaagactcgctctaaatttgctagacagcaatcaaaagatgagccgaaaacatagaagtcattcgtaaacacttcaatgcacttctccaccatgtcagcaaatattgccatcattcatcgctgaaaattcttatgagcattgcaaagatcgaagggcgttcttctataagcaaacacaccaaaagggcaggtgaattctgtcttttcttggtcatttggatccatagcaatctgattgtaaccagagtatccattcaagaaacagtgaaatgatt

SEQ ID NO: 14043 - DNA, 353 bp, Glycine max
agcttataatatatcgaggcgctcgaaatgtttactttagctcttgagaaattcaaatggtcataacttttaactcggatgtccaattcatgcgcatcacatatagagacgctaaaaaatgaacaacggaagctcttcaaaagataaaatggtcttaagttttcacactgaggtccgattcaggcttataatatatcggggcgctcgaaattgaacaacggaagctctcgagaaattcaaatagtcataacgtttaactcggatgtccgattcatgcgcatcacatatagagacgctcaaaaatgaacaacagaagctctcgagaaattaaaatggtcaaaacttttgacact

SEQ ID NO: 14044 - DNA, 362 bp, Glycine max
  unsure at all n locations
gagccaattcaaacgacaataacaatttactcggatttctgattgagtcccgtaaaatatcaaaacgctcaaaattgaatgttgaagctctgagcaaattcaaatgacaatcacttttttactcggatgtctgatggagtcctataatatatcgagaggctggaaatggaataccgaaggtttgagcaaattcaaacgacaatattgttttactcggatgtctaattgactcccggaatatgtggagacgctcgatatggaataccgaatctctgagcaaattcgaacgacaataaattnttactcggatgtctgatncagtcctgtaatatatcgaaacgctcgatattgaatgttgaagc

SEQ ID NO: 14045 - DNA, 398 bp, Glycine max
agcttgctgtaggccataaatcgccttgttatgtctgcaaacttgttgcttgttggaagacacaaaaccagggggttgaatcatgtaaacctcttcctcaagaacaccattgaggaaggcattattaacatctagtttctgaagaggccagttgtgagacagcaagagaaagaataagtctgatcgtgacaggtttgattacaggggaaaaggtctccttataatcaaaccccaattgctgatggaagtctttggcaacaagcctggctttgtacttattaacagacccatctggattttccttgaccctaaaaacccatttgcacccaattgttgttctggaagcaggaagatcaaccaaggtccaagtgtcatttctcatgagtgcatcatactca

SEQ ID NO: 14046 - DNA, 441 bp, Glycine max
agcttatgctgcaaacatttataatagacttcttcagcagcaaaaccaacaacagaagaataattatgacctttcaagcaatagatacaatccaggttggaagaatcatccaaatctgagatggacaagtcctccacaacaacaacagcttgtccatccttttcagaatgttgttggtccaagcaagccatatgttcctcctccaatacagcagcaacaacagcagtagtcacaacaaagacaacaagcagttgaggctcctcctcaaccttccttagaagagttagtgaggcaaatgatcatccaggatatgcaatttcagcaagagacaagagcctccattcaaagtatgacaaatcagatagggcagtggctactcagatgaaccaagctcagtcccaaaattctgaccaattgcttcacaactgtgcagaatcaaaa

SEQ ID NO: 14047 - DNA, 391 bp, Glycine max
agcttagtggcttagtgaagatgatatttaaaagtgactcaacaggttgaggtgtgtctcaccattgggagatataatgacaaggtgctgtgtgatgtggtcccaatggaagcgacccatgtgctgttaggaagatcgtggcagtatgataccaaggcagtgcatgatggcttcaccaacaacatctctttcaagcaagctgacaagaagattgttctcaaaccgttatctcctcaagaggtttgtgaggatcagataaaaatgagagaaaagaaaaagagtgagacactcgagaggaaaaagagtgagacacttgagaacgaaaagtgaggaaagaataagagtgaaacactcgagagggaaaagagagaaaacaaaaagagtgaaacac

SEQ ID NO: 14048 - DNA, 222 bp, Glycine max
  unsure at all n locations
agcttctgttgttcaattntgagtgtctcgttatattatgcgcctgaatcgaacatccgagtgaaaagttatgagcatctgaatttcttgagagcttacgttgttcaatttcgagcggctccacatgtgatgatcctgaatcggaccaccgtgtgtatagttatgaccatttgaatttcacgagagcttgtgttgtcaatttcgacggtcttaatatgtgat

SEQ ID NO: 14049 - DNA, 436 bp, Glycine max
  unsure at all n locations
agcttgngcccattctgattcttcttatttctactcaactaggattctcaaagaaggagcctccaactcaaacgggagcacaaccttcatcccatacaccaaagagaaaggggttgccccaatagatgtgcacacagaagttcgataaccatgcaatacaaaggggagcatctcgtgccaatccttgtatgacacggtcatctcctaaactatcttctcgatatttttattggcaacctcaattgccctattcatctttggccgataaggcatggaattatggtgttggaatttgaaatccttacatatttccttcatcatcttggtgttcagattagtggtagtatcggtgattattttcctaggcaacctatatcngcaaattatctctttcttgatgaatctaatcactacattcttaggcacactagcatat

SEQ ID NO: 14050 - DNA, 359 bp, Glycine max
agcttgtaatcgattacacacttacttgtatctaataacagaggagattttcagaagatattctcaacaatcacagcttttcatatggttcttgaatggccatcaaaggcctatatatatgtgacttgagacatgaatctgctaagagtttttcaaaacaacaagtgtttattctctcaaaaagcaaaatccgtttatcctcttaagaactccttggccaattcaattgcaattcattaaggaatcatttgagtgctcagattgtaaaatctatctctttcaagagagagtcattcttcttctctttctaattcactaagggattaagagaccgagggtctcttgttgataagaattct

SEQ ID NO: 14051 - DNA, 387 bp, Glycine max
taaatatgagcagatgttatcagaccttacaaagaatctcctgctatgaaaagttgtcgcatgtaagttgatgctaattcctttttctgctactaacagataagttacttattgtgaattatgttttctttaatacctttctattaatgatatttggatacaactacagacatgtacacagtggaatatcaaaaacgaggacttcctcatgtccatttatttttatttttacatgccaacaacaaatatgcatctccaaacgatattgatcatattatatcagcagaaataccttgacagaaagatgatccagaactctataaattagtgcaaaatcacatggttcatggtccatgtggaattttgaggcccgcatctctatgcatg

SEQ ID NO: 14052 - DNA, 245 bp, Glycine max
tttcaatttcgagcgccacgatatagtacgggacacaatcggacatccgagtaaaaaggtatagttttttgaatttcctcagagcatcagttttcaatttcgagtgtctccatatattacaggactcaatcagacatccgagttaaaagttattgtcgtttgaatatgctacgagcttctgttttcaattgcgagcgtctagatatactaagggacacaatcgttcattcgagaaaaaagtgaat

SEQ ID NO: 14053 - DNA, 396 bp, Glycine max
  unsure at all n locations
agctntcattcctatttcttttctcacttctgcattcataattaaaacaaagtactagtgttacattacacacaaatatactttgtttcagtttcttctttaaatgaaatattaattatgcttgaagaatcttttaaaattccaatttcctcaatttgattatctttatatctcatggaagatttttaataacaagttaatacataatgtaattaaagttttcaattgattaattttttttttaaatgacatccataataaacaattactatatatacaaaagaaaacaaaaatcgttaaaacacatacttaaacaacaataatcataactagtatggatgtatgattntctaaatgttaacacaaatctatgttgtaattcaattntacatcatg

SEQ ID NO: 14054 - DNA, 318 bp, Glycine max
  unsure at all n locations
agcttctccataatttccacatgtctcacttacaggtacaagggaagtattctccaaattaaaaaccctatattacgctagcccttcactcttccctcactctaggtactcttcttcgtggtatccaaagcccagaaacaccccttcataatattgtcaatgtaggtgaaatcccttgccacagttcccccatcaagagactngaatatcggaatatgcttccccttgagaatgtccttcgtgggtaatggggacaacgccaaagagcatgcaaaggagggcaacatcattgaggttggtgtcaacgacaaagatgct

SEQ ID NO: 14055 - DNA, 397 bp, Glycine max
  unsure at all n locations
cccaccattttgtcatagaaaacactggttatgtgtctactattattgtgatcatctctttctccgtcattgtaggtgccacttgagctgctagatccctccacctctggacatattgcttgaaggattcatgctctttttcacacatgttctatagttgcatgctatccgaagccatatcaaaattgtactgatactgcttaacgaaggcaaccattatgtcccttcaagaatggactcgggaaggttccaagttagcgtaccatggaacagctaccccagtaagactttcttggaagaaatgtatcagtagttcctcatcttttgcgtatgcccccatcttccgacaatacatctntagatggtccttggtgcaagtagtccacttgtacttgtc

SEQ ID NO: 14056 - DNA, 364 bp, Glycine max
atccttaagcgacctgcggctgcagcttgagcaatgaaatgacatatcttatatcacggatgtccggttgagtcccgtaagatatcgagacgctcaaaatttagatccgaagctctgagaaaattgaattgacaataactttatacacggatgtccggttgagtcctgtaatatatcgagacgctgcaaattgaaaacggaagctcgtaggaaattcaaacgacaataactctttactcggatgttcgattgaatcgggtaatatatcaagacgatcaaaattgagactagaagctttgagcaaattgaaatgacaataactttatacacggatgtccgcgtgagtcccgtgatatatcgagac

SEQ ID NO: 14057 - DNA, 457 bp, Glycine max
  unsure at all n locations
cagcttaagaataatggtctcaacaaactgcttatttctatattgaaattcaatcaatagacctccaatctttaatggagagggttaccactactggaaaacccgaatgcaaagttttattgaggcaatagacttaaacatttgggaagccatagaaataaggccttatatacccaccacagtagaaagaaccacaatagatggaagcacaacaagtggaagcacaataatagaaaaacctagagatagatggtctgaagagtatataagacgagtaaaatataatttaaaagccaaaaacataattacatctgccctacgaatggatgaatatttcacggtttcaaattgtaagagtgctaatgaagtgtgggacactctacatgtaacacatgaatggcacatagatgttanaagatctatgataaacacattaactcatgaaatatgaactatt

SEQ ID NO: 14058 - DNA, 422 bp, Glycine max
  unsure at all n locations
agcttaagaaaaagatggcctcagtattcttcttatttccagaagggaattctatcaatagacctccaatctttaatggagagggttaccattactggaaaacccgaatgcaaatttttattgaggcaatagatctaaatatttgggaagccatataaatagggccttatatacccaccacagtggaaagagtttcaatagatggtaggtcatcaagtgaaagaataactatagaanaacctacagatagatggtctgaagaggatagaaaacgagtacaatacaacttaacagccaaaaatataataacatctgccctgcgaatggatgaatatttcagggtttcaaattgtaagagtgctaaggaaatgtggaacactcttcgattaacacatgaaggaactacggatggtaaaagatct

SEQ ID NO: 14059 - DNA, 332 bp, Glycine max
atttattatgaaaacattcaagttcaaagagacttggaactcatggcttttttacctgtttccccacctagcatgcgactctagaattatgctttcttcttgcggtgttattggaccctgcgtgtggtctggcctcaagtaattcacccatcttaatctgcagctcttcccatttcgtttagtggtgtggagagaataataattgatcaatcatttggacaaaaaaagagatgataaaaacgatgatgaagaatgatactcatgagtcaagagttaagaataatataaaacatgatctccaaaggctaaatgaaaaacttatgtgtaagggt

SEQ ID NO: 14060 - DNA, 326 bp, Glycine max
gaaggtcttaaattttgatgagactctatcaggggaaaagagaaagttgcaactcttggagctgatagagatgaggttgaatacttatgagtcttcaagattgtacaaagaaaaagtgaaggcttgtcatgacaagaagctgataaagaaagaatttaggctcaaccaacaagttctgctatttaactcaagagtgaagctatttccaggcaaggtaaagtctaaatgggctggaccattcaccatcaatgatgtcaagccttatggagcagctggaattattgacccttagtcagaaactttgaatataatatggatagtgaatg

SEQ ID NO: 14061 - DNA, 180 bp, Glycine max
  unsure at all n locations
tgatgctcagaaacagcaatatccaccactccttcagttggtctgcccangtatttgntgattacagcangggagaatctaacacattttcctctgacnaacactttctgatactcatcactctttcntgttgtatgtcagagggaatgtngacaatgaattccctgactagacttttat

SEQ ID NO: 14062 - DNA, 245 bp, Glycine max
  unsure at all n locations
gtaaattcgagcctctcgacatattatgcgcncgaatcggacatacgtgtgagaattcatgatcatttgaatntctcgagagnttccgatgtntaatntcgagcgtattgatatattataaccctgaatcggacctcagtgtgacaagttatgaccattttgaattgacgagagcttctcgtgttcaatntcgaatatcactatatgtgatgcgcctaaattggacattcgagttaaatgttatg

SEQ ID NO: 14063 - DNA, 252 bp, Glycine max
  unsure at all n locations
gcgtgtatatgagttatgtccccgaatcggacatctgtgttgaaagttatgaccattcgaatttctcgagagcttccgttgttcaacttcgagcgtctcgatatattatgaccccgaatcggacatctgtgtgaaactgatgaccattctattntctcgagagcttccgttgatcattccgagcgtctagatgagttatgtccccgaatcggacattcgagtgaacacttatgaccattctaatttctcgag

SEQ ID NO: 14064 - DNA, 477 bp, Glycine max
tggtgaagtaacccggcttctggtgtggcaagtataggttttgcttacaaatagtgtagttgcaaacaaaatctttagtgtcaaagtacatgtgttggatcgagtggcctcagaataattaagaacgaggggtttaattaattattcctaagcctttactaattaaaaatttactcttctaacgcttttactatgttgttaagagaataaggagtagaagagaaacttaaccaaaagtaaaagcggaaattaaaatgcacagcggaaagtaaaagagtacggaagaaggagacaaacatacaagagtttttatactggttcggcaacaactcgtgcctacatccagtccccaagcgacctgcggtccttgagatttctttcaaccttgtaaaaatccttgtacaagcaaagatccacaacggatgtaccctcccttgttctctgtgaacctactggatgtaccctccactagaactg

SEQ ID NO: 14065 - DNA, 452 bp, Glycine max
  unsure at all n locations
ntgattgtgaatgagttgttcacaatgctagcttntttcttctgtacatcctaataatgaatcaacaataaatggttgctgaatgaacaatagatggttaattaattaactagcactgcacaaaaaaaatgaaattttgttaagatctcattgatcagaaccaagcaacccactttcctcatcatcatttttattttcccgctctgttgttttctgagctagctccactgccctcttacattgctgctcccaatctgtttgaatcaatgtgtaaaccatcatacaaagacatgaagcctgtgcagccaccattccagaccacaaacccaccaattcatatttatatatgaatgtagcaaaaacagaaactggctatccaactagataaaatgcacatcaagttattctggcacccaaataatgcctagcagtgcctgactaaatcccacatg

SEQ ID NO: 14066 - DNA, 392 bp, Glycine max
tgtttcagtccatttagagatagtgctaaccttgacgctagatcggtgcacgggttgtgccaaatgtaccatatgctcagaaattattttgcacacccgatagaactcctaggtgacgtgggtcatgtggaatgtcgtttcagtctgtttgggggcgtgctattgtcactgcaagataggtgcacagattactccaaacgtaccataggctcataaatcattgtgatcgcacccgatggtactcctacgagacaacgcccaagtgcaagcacgtgtcaatctgattggagatagtgcttatcttgacacaagaatggagcacggttcgtgataaatgtactatatgctctacaatcattttggatgccctctattgaactaatcactgacct

SEQ ID NO: 14067 - DNA, 424 bp, Glycine max
  unsure at all n locations
aggacttcctgtgtttgngaacctctccttcctcaggtgtacccaaacccaatcacctggttcaagcacgactttctttctgcttttgtaggcttgccttgcatagctatcattattcttgtcaatttgaaccatcacttgctcatgcaacttcttgacatactcagctttagcctgtgcatncttatgcttatgcattgcantgttaagcatttgcaacaaatctagatgagtcaaaggattaaatccatacactatcttaaatggcgaacaattagtagtgctatggacagcccgattataagcaaactcatcatgaggcagacaggcttcccaagatttaagatttttctgtaaaacagtcctaagcagtgtgcctaaagtgctattgactacctcagtttgaccatcaattcgtgggtga

SEQ ID NO: 14068 - DNA, 466 bp, Glycine max
  unsure at all n locations
tcttgaagttgttttctttntgagacttcttcagaagatagttgtctatggcttgtgtcttcctctagtttatttatttcagcctccaccttcttaacccttttgagagtatctccaaactgttcctgattccagatcttcaaccttctttttagtctcttaatcttttctttcaagacatacccaccccagcctggttgctgatgcgaattccagctttggtacacaatctccttaaaggatttatctgataaccagcaatcaagtatcctaaaaggcttaagaccccaatctgttaccttggaacgaagaaggattggacagtggtctgaaaagtttcttgccaaagtagattgatagctgccaggccatctttcaatccactcatgagagaccaagaacctgtcaatcctgctcctagactccccatttggtctataccacgtgtagtttctaccaatccatg

SEQ ID NO: 14069 - DNA, 457 bp, Glycine max
tcacaacaattacttttaaagaattctttaatttctaaaattaatctccaccaaatatgtactaaatggaaaaataagaagaaaaataaaactaagctcaactattatgtgatactaaaagtaagtaataaacttatctataaacacatattaatatgtagttaggttctttggacaaacttccttataaatacttattaaaaaaagtaaaggtaaaatgtattgtgtttctttaagtaagcttaaaattaacttattaatttttggagaatttatgaaaagaaattctataaacgttaattatataagtttttgtaaagtaaatgtataagttaattctagtttataaaaaactgaatacattcttactttcttatctattatcctactataggtatttctagaagaatttatctatataagaccttaataccacaataaatattaatcaatgata

SEQ ID NO: 14070 - DNA, 447 bp, Glycine max
ctaaatcgaagaacaatctcataattattcccataaaactaaaacttaaaaaaaaattagatatggcctgtgcttatgaataaattataaggtgatataaatttgttgtatatacatgaaaatatgataacaatttttccattttttctactaattcatattttaaatctattaacttcatcttaaattatattataaattggacatttttacaatatttgtctttaaatttatattgaaaagacaaattgctataaagtacttaatttaccgtttgtaattacccttaactaaactaataaaaatataaacttatcttttcaatagaactttttaaaattgtatatttatattaaatatttatgttatattatatatttattattataatctaaatatgcatgaaggaaggcaataatattatcttaattaatatctttattgcgt

SEQ ID NO: 14071 - DNA, 467 bp, Glycine max
  unsure at all n locations
tgtaatcgattacacacatactgtaatcgattaccataatagattttcagaaaatattctcaattgtcacatcttttcatttggctcttgaatggctatcaaaggcctatatatatgtgacttgagacacgaatttgctaagagtttttcagaacaaaaaggtcttatcctcttaaaaagcaaaatcgttttatcctcttacaaattccttggccaaaacacttgtgattcaataaggaattatttgagtgctcaaattgttcaatctatctctntcaagagagatatcttcttcacttcttctttattctgaaaagggattaagagaagggattaagagaccgagggtctcttgttgtgaaagaattctaaacacaaacgaaggattgttgctgtgtgtttagaacttgtaaaaggaatttacaagatagtggaactctcaagcgggttgctcgtggactggacgt

SEQ ID NO: 14072 - DNA, 467 bp, Glycine max
  unsure at all n locations
actaagcttaacatcagaccacttccgggtgctggaactacttcacatggacttgatggggcctatgcaagttgaaagccttggaggaaagaggtatgcctatgttgttgtggatgatttctccagatttacctgcgtcaactttatcagagagaaatcagacacctttgaagtattcaaggagttgagtctaagacttcaaagagaaaaagactgtgtcatctagagaatcacgagtgaccatggcagagagtttgaaaacagcacgtttactgaattctgcacatctgaaggcatcactcatgagttctctgctgccattacaccacaacaaaatgacatagctgaaaggaaaaacacgactntgctagaagctgctatggttatgcttcatgccatagaacttgcttataatctctgggctgaagccatgaacacagcatgctacatacacatcagagtgacac

SEQ ID NO: 14073 - DNA, 387 bp, Glycine max
gacacttaaaactcagcttaacattcaacttcgagcgtctcgattatgacgagtctcaatcttacattcgagaaaaaagttattgtcatttgaatttgctcagaggttcaacattcaatttcgagcgtctcgttatattacaggactcaatctgacattcgagtaaaaagttattgtcgtttgaattagctcagagcttccacattcaattttgagcgtctcgatatattacgggcctcaatcagactttcgagtaaaaagttattgtcgtttggattggctcacagattcatacattcaatttcgagcgtctcgctctatgacaggactctatccgacatccgcgtccaaagttatcgtcgtttgaattggatcatagcttcaaca

SEQ ID NO: 14074 - DNA, 423 bp, Glycine max
actcatctgctttgcttcttcacaaacaaatattcggaaattttcggatcatataagatatgaatgcgcaatttatgtcaggaacatacctgtggaagtggttgagcagccattacatcaagccagaaatctcttcgcatgtacatcgatgcaattcttgaagagtctatgattagctctcctctaccagaaacacgagaggaaggagcaatatatgcagtttgaaaccgaaaataaatctgaataatgtaaaatgcatcaatcaatgaccggattatggtgaggaacacttcaagaccagttgacatatcaatgcacttgtctttcttagccctgggagtaaaagaataggggatgcacatataacgaaagctaacaagctgcttagaagattatgttccatgtatttactctatgtgccct

SEQ ID NO: 14075 - DNA, 412 bp, Glycine max
  unsure at all n locations
tgtaggcctaggatcttctntatcaatggatttctttgcttcttggaagatgaatggcaacggaataaagaaggaagagagagaggagacgccacttcaaggagaagatgagtctagaataagctcaccaccataggaggccatggataagagcttggaggaagaaggagatgaatgaagagagaggaagagaagatcatgaaattttgtgctctaaaagagctctgaaatctcaagtttaattttcaaatgatcaaagttggaaaaatgcacacacatagcctctatttatagcctaagtgtcacacaaaattggagggaaatttgaatntctattcaaatttcacttgaatgtgaaattcaatttgtggagtccaattttggagccaaaatttcactaattatgattagt

SEQ ID NO: 14076 - DNA, 442 bp, Glycine max
agccttgccccttgatatatctgaaggactcatgagacactatgaatgactaaatccttgggatacaggtagtgttgacatgttttcaaagcccgtactaatgcatacaactccttatcataagttgaatattataaggtaggaccacttaactatacactaaaattagcaattggatggccttcatgtatgaacacagccccaatgccaacattagaagcatcacactcaatttcaaaagatttttgaaagtttggcaacgcaagtatggcggcattaaatagcttttgcttaagaacatcgaaagcattatcttgtttctctacccattataaaccaacatctctcttgagcacttcattgacaggtgctgccaatgtgctaaaatccgactataacaacttgctaagccatgaaaactactcacctcggacacacactt

SEQ ID NO: 14077 - DNA, 478 bp, Glycine max
tacggacactatgaaactaagctatgctgctatattacaatagacctcctcaacctcatcagcaaaatcaaccacagcagaacaattatgacctctccagcaacagatacaaccctggatggaggatcaccctaatcttagatggtctagcccttagcaacaacaacagcagcctgctccttccttccaaaatgctgctggcctaagcagaccatgcattcctccaccaatccaacaacagcaacaacctcaaaaacaaccaacagttgaggctcctccacaaccttccctcgaagaacttgtgaggcaaatgactatgcagaacatgcagtttcaacaagagaccagagcctccattcagagcttaaccaatcagatgggacagttggctacacaattgaatcaacaacagtcccagaattctgacaagctgccttcccaagctatccaaaatcccaaaaatgtcagtgccatttca

SEQ ID NO: 14078 - DNA, 446 bp, Glycine max
  unsure at all n locations
ngaatacaatagaaattgctaacttaacagagctaagattcactcaattcactcaagtttcgtttgtccaataaaactgacaacattacaacactttgtttgttttgtcttaagttattctttgtgattcaacaacattaacacaaacatcttcaaactttatatagactttagagctttgatctgttgagagataaactatatatactttgtccaatataacttgggcatttctttgtgaaacattttaaaactccacttgactcacataaatgctttaagaagttggtttatcatgatgcaatcctaccccgcaagggcattggatagaagactccaagtagattgggccagagatccaagggaaggtcctatggttctcatgagccttanggtagatttcaagctcatgggctaagtatgagctcgcttatctttgtaaatat

SEQ ID NO: 14079 - DNA, 460 bp, Glycine max
  unsure at all n locations
taactactcagatatgggaactgatggaatgaagattcgcttcttttccttcgctgtcttggacttatgaaaatatttctttaggaactnttccacaacttcatcccaagtccttaagctattacctccgaatgaatgcaaccacctcttggcttctctagatagtgaaaaatgaaaataagctgagcctagtatcatcttctggcacaccaacaattctcgcagtgttgcatatttcaatgtatgttgctaggttcacgtaaggatattcatttggcaatccatgaaacaaattgccttgtattagctgaaccaaagaatgtggataggtgatattttgagcctgaacctctggccgcacaatactggtgaaaaattgtggcacacatgtactcgagtagtctttaagggttactcttctggngtgctcttcanccattatgtcagctacgggcactat

SEQ ID NO: 14080 - DNA, 335 bp, Glycine max
atgcatcagacaaagatgatggcaaatccatttcaggatatgttttcactttacatggtggtgcagtcagttggaaaagttccaaccaagctacggtagctgattctactactgaagcagaatatatagcggcaagcgaagccgctaaagaagttgtttggattaaaaagttcatatttgaacttggcgtggttccttcaataaaagagtcggtcccattattgtgcgacaataatggggctattgctcaagcaaaggaaccaagatcacaccagaagtccaaacatattttgcgaaggtgtcacttgattagagataatagaacgtggcgatgt

SEQ ID NO: 14081 - DNA, 423 bp, Glycine max
  unsure at all n locations
actctgttggaagatcattatttgctgttacttctactataggatcttcattgcttccttctccttttcctttagaatcttgcccatgaatgtgcattngttctaaagattctgcaatatcatctaaaatatcctttcttggagaaataacattagactcatcaaaagaaacatgaatagattcttcaatagtcatagttctcttattatatattctataagctttactatgcacggaataaccaaggaaaattccttcatctgacttagcatcaaactttcctaagttttcttttccattatttaatacaaaacatttgcaaccaaaaacatgaaggtgtgaaatgttgggttttctaccattaaacagctcatatgcgagtttctttataatgggtcttattaaagccctgttcatgatat

SEQ ID NO: 14082 - DNA, 401 bp, Glycine max
caattacaagcgtctagatatattacgggacttaatcgtacatcccagtaaaaagttattgttgtttgaatttgctcagagcatctgttttcaatttcgagcatctcgatatattacgggactcgatccgacatccgagataaaagttattgtcgttggaatttgcccagagcttcaattatcaatctcgagcgtctcgaaatattggagcactcaatcggacatcttagttaaaagttattgtcgttcgaatatgctacgagcttctattttaaattacaagcgtctcgatatactacgggacataatccgacatctgagtaagaagttattgccgtgcgaatttgctacgagcttctggtttcaattacgagagcctcgatttactacgggacacaatc

SEQ ID NO: 14083 - DNA, 480 bp, Glycine max
  unsure at all n locations
actaagcttacaccacattctactcttcaatcctcaacatcgacatgttgtggtctctgctcccgcaagaagtgaaggcctccaaggagaacaaggcatcgttcacacagtttgggtactttaaggttctcaaaaaaggtgttttgctgtagaactagtccgttgttgtcaaggccaagcttattatccaagatcgctaagaagaagatcaaggaggctggcagcgtcgttgttctcaatgcttgaatttgatggtgtcgcttttttgaatgatttaggttttttttattttgttccaatatgtctccttttggatgacattgttgttgttcaatctatgctatatttcatgatttaatttacgggtttattattttaatttatgcattttagaattttgcttatttatgttgaatntaatcacgtntaactatgatagcttgatgatgttaaaatctatcgaaattgttaaaattgtgc

SEQ ID NO: 14084 - DNA, 465 bp, Glycine max
  unsure at all n locations
tcaagaaaaagatggcctcagcaaattccttatttccataaaggaattctatcaatagacctccaatctttaatggagagggttaccactactggaaaacccgaatgcaaatttttatcgaggcaatagatctaaatatctgggaagccattgaaataggtccttatatacccaccacagtagaaagagtttcaatagatggtagttcatctagtgaaagcataaccatagaaaaacctanagatagatggtctgaagaggatagaaaacgagtacaatacaacctaaaagccaaaaacataataacatctgccctaggaatggatgaatatttcagagtgtcaaattgtaagagtgctaaggaaatgtgggacactcttcgattaacacatgaaggaactacagatgttaaaagatctacgataaatgcactaactcatgagtatgaagtatttagaatgaata

SEQ ID NO: 14085 - DNA, 401 bp, Glycine max
  unsure at all n locations
ntgaccataatcgcagggacaataactgttactcagatgtacgaatgaatcccgcaatatattgagacactcgtaattgagaacggaagctcgtagcatattcaaatgacaataacttttaactcggatgttcgattgagtcttgtaatatatcgagacgctcgaaattgaaaacggaagctctgagcaaattctaacgagaataacttttactccgatgttcgaataagtctccgtgatatattgagaggctcgtaaatgaaaacggaacctcgtagcaaattctaaagacaattactttttacttgaatgcgatggtggcccgtaatatatcgtgacactctacattttaaatggaagcttcttgcatatgctaaccacaatgacattttactctgatg

SEQ ID NO: 14086 - DNA, 407 bp, Glycine max
  unsure at all n locations
tctggtgtggacatctgacttgctttccaatctgacattctccacagattctgccctcttctattntcagattgggaatgcctctaacagcacctttgtcaatgattttcttcatgcctcttaagtgcagatgtccaaatctttgatgccatattttgacttcatcttctttggagaatagacatgtggaggagtagctggtttcttgaggtgtccataggtaacagatgtcctttgatctgctgcccttcattagaacttcactcttctcatttgtcaccaagcattctgactttgtgaagtttacattgaatccttcatcacacaactgactgatgctgatcacggttgcagtcagtcccttcaccagcagtactttgttcagactaagaagtccatcatgaact

SEQ ID NO: 14087 - DNA, 387 bp, Glycine max
tctaacgataataactttgtactcggatgttctattgagtctcgccatatatcgacacgctcgaaattgaatgttgaagctctaagcctattctaatctactataacgctttactcggatgtccgatacagtgacgtcatatatctgagaccgtcgaaatggatagctgaacctatgtgccaatctaatcgacaattactttttactcggatgtctgattgagtcccatcatatatcgagacgctcaaaactgaatgttgaccctctgagcctattcatacgacaataacttctttctcgtgaatctgattgagacctgcatatatcgagacgctcgaaatgaatggtgaacttttggcctatggaacgacaataactttgatctga

SEQ ID NO: 14088 - DNA, 240 bp, Glycine max
  unsure at all n locations
tccgaagctctgagcagattcaaacgacaatcactntntactcagatgtctgactgagtaccgtaatatgtcgagacgctcaanatngaatactgaagctctgagcaaattcaaacgacaataacttgtcacttagatgtctgattcagtcccgtaatatatcgagatgctcgaaattgaagaccgaagctctaagcagattcaaacaacaataacattttactcggatgtctgattgag

SEQ ID NO: 14089 - DNA, 239 bp, Glycine max
  unsure at all n locations
gagactatcgtgatgaattgttatgtgatataatccctatggaagcagggcacattntgatgggtatatgatgtagctccatgtggagcttgtaggccttggatcttcttcatcaatggaatcctttgcttcttgaatatcaatggaagaggaatggagaagacagaaagatgattggagatgccacttcaaggagaagatgagtcaagaagaagctcaccaccatagcaagccattga

SEQ ID NO: 14090 - DNA, 301 bp, Glycine max
  unsure at all n locations
atctccttcttactacatcaagaatcactgggtngagtcttctctgtggctgtcttactggtttatgctccatcctctagattattcgatgcatacatgtggatgggctaataccaggaatgttcgccagggtccagcctatagccttcttatgcttcttgagaacaaacaacaacttctcctcttgctcatcagtaagggaggcaaatataatcactgtaaaacttcngctatcatccaagtaagcgtatcttaaaattgatggcagaggcttcaattctggtgtggtcagctggatagt

SEQ ID NO: 14091 - DNA, 211 bp, Glycine max
  unsure at all n locations
actatccctgatttcaagcttttgcanattanggcatccttcaagcacatatttaaagccgacgtcagtgtccccagcaaaggcaactgacagcgtcctaaccaatntcccatacatcccaatgtactcaaaaacacgatcagtcagcaaaccagacatagcaagccgagtgagcttcttgcaattcataacaatagcaccaaaaccctca

SEQ ID NO: 14092 - DNA, 221 bp, Glycine max
  unsure at all n locations
tgagatgagtagtggttggagtctccatgtattgactgatgagtcgagtaccatatagaatgtctggtcttgtggacgtcaaatatcacanactacccaccagactctngatatttgagcacccatctnntttgcttcgtcaaactttgataacttcattgtgcactccaccggtattccaattggcttgcatacgtttgctatgaaatgaagattcaatc

SEQ ID NO: 14093 - DNA, 249 bp, Glycine max
  unsure at all n locations
agactggcctcacagtgatcagaaatgagaaggaggagctgattcctactcgggtgcagaacatgtggagagtctgcattgactataggaggctgaaccaggttaccaaaaaggaccactttcccctgccattcattgaccagatgcttgaacgcctggcaggtaaatcccactactgtttccttaatgagttttctggttatatgcaaattactattgctcctgaggatcanganaagaccacattca

SEQ ID NO: 14094 - DNA, 450 bp, Glycine max
  unsure at all n locations
ttctagtatttttctgttctttccttggagaacttatcatacgcaaaactatttatcttactcaacccgatgtaactccttaaacattcaagttctcaagatatgataacgacatctcttctaatatatntctntntattattgatcaatattngttaaatntaaaataatctttntgttggtatttaaaataatgtaaatcataatgaagtttactaataattacatatgtntgattaattgcaactaatatataatattggtagaaaaatttggtggtgagatccttccagtatatctatctcataatctaatatactaatttgatttaaaacgtaacataatacttgttcaagacagatttatatataaataatatttaaaatattatttaaataatggaaactatatcatgaccttatatatatctgttcgaaatcacttaattgt

SEQ ID NO: 14095 - DNA, 210 bp, Glycine max
  unsure at all n locations
tagtggtacttgacctgagcaaaccctttgtggtgtactgtgatgcatccaagatgggtttgggtggagtgcttatgcagtgnggacaggtagtggcctatgcttctcaacagctaaagagacatganaggaattatcccatgcacgatcctgagttagcaactgtagaatttgctcttatactntggaggcattacctntatggatcta

SEQ ID NO: 14096 - DNA, 364 bp, Glycine max
ttatgtagacttgaccatattctctaattgaaccttggatccctgtcagagacaatactaaaaggaattccatgcaaccttactactatcttgatatacaactccactagcttttccattctatacctcatattcactgggataaaatgagcagacttggtgagtcgatctactatgacccacacggcatcatgcccacgactagtcttgggttaactagatacaaaatccatagatatgctctcccattttcaatccggaatctccaatggcttcaattctcccgaaggtcgctggtgctcaaccttagcctattgacatgtcaaacatcttgctacatatttggctacatcttttttatgcc

SEQ ID NO: 14097 - DNA, 373 bp, Glycine max
gacctttcacccatcacatagagcttaccctcaaatgctcaagcaaaacaaccccatcttgggcggcgaaggctctctatcagtgcccacttgccggtatctggatcatacacctcagcactggagagactgtcaccattcaccccatagcctcccacagcataaaccaaaccattgacttcagcacaagcgaagtcataacgagacacattcatgtctgacaatctgctccagctgcaattgcaacagagaatggagcaagtctaaagccaacttatagacagacatataatatgagagaaattcataagtgtcacgacgtaacagattataaggccatctcttacaaaatcacaaagatgaatttatcata

SEQ ID NO: 14098 - DNA, 230 bp, Glycine max
  unsure at all n locations
actctncttctctnctctcccttgagcanngataaatcatgggtccgatgctgctgagccaactcgccaccggtctaagcgttctcgccggagccggtcttgtgaaatctggtatggaccanaagcccatggcaggcccattcactcgctgccncacgtgcaacggaaccggtcgagtcacgtgcnnctctgtcgcgtggtccgacggcgatgtcggatgctccacatgc

SEQ ID NO: 14099 - DNA, 361 bp, Glycine max
  unsure at all n locations
tcttgagaaaacttgcttgagaagcttcttttataaatctttcttgagaagctagagcttagctacacatacccgtctaatagctaagctcacctccttgagatgagaagctagaacttagctacacaccccttataatagctaagctcacccccatgacaaaatacatgaaaatacaaaaaaagtccctactacaaagactactcanaatgcctcgaaatacaaggctaaaaccctatactactagaatggccaaaatacaaggcctaaatgaagganaaaacctattctaatatttacaaagataaacgggctcatacttagcccatgggctcaaaatctaccctaaggctcatgagaa

SEQ ID NO: 14100 - DNA, 412 bp, Glycine max
ccagcatacacagtttcacatgcttaagagataaacatactattttaagaaagggagaaaaagtttaaggaaagcactgcagactagagtatgaataatctacctcaataaattgagtacagtaacggggaaggctgcgtttgaaccacaaaagagagattacatcacccacaccataaccattttcaataatggtagacattggtacaccagcatagcatggctcctcaccttcggaaaaataatggaagaaaagtttaatttagctatcaaatgtgtctaggacacctcagttccatgttacaacttataaattcgaaggatcccaacatacctttgtcatcagagatggtggaaataatgtgagttggagcacgttcttgttcactcctaatagctgtgttaaagtcct

SEQ ID NO: 14101 - DNA, 439 bp, Glycine max
cctgcccttgcagagattaatgttgtatctaatcatgtctttttatcaggagatgaggttgctctttcatgtgaaaagtatactgctttgacgtgcgcagctcgagattcagaggaacaatccaagaagagagttgctagtgctatgcttgaagttgacgaaacaaatttgtcgcacatggacattttgaagagggtagaagaagctacataagaagttaaaaccaccaagaatgcccttgatgaagctctataaagggtagaagctgcgaatagagacacagtacctgttgaagaggctttaaggaattggcgatctgacggacaaaagagacgtgtttctatacacaactctaccaagttcaaaaactgtggtttgtctcatcattggagagatcctcaattacttgatgtgaatggattgcatttggtaaatgatg

SEQ ID NO: 14102 - DNA, 482 bp, Glycine max
  unsure at all n locations
acactataaaaccccgcttcaagaaaagatggcctcagcaaactccttatttttattgggaattctatcaatagacctccaatctttaatggagagggttaccattactggaaaacccgaatgcaaatttttattgaggcaatagacctaaatatttgggaagccatagaaatagggccttatatacccaccacagtagaaagaattacaatagatggcagttcatcaagtgaaagtataactatagaaaaacctagagatagatagtctgaagaggatagaaaacgagtacaatacaatttaaaagccaaaaacataataacatctgccctgtgaatggatgaatatttcagggtttcaaattgtaagagtgctaaggaaatgtgggacactcttcgataacacatgaaggaactacagatgttaaaagatctangataaatgcactaactcatgagtatgaaatatttagaatgaatgca

SEQ ID NO: 14103 - DNA, 278 bp, Glycine max
  unsure at all n locations
tccatcatcacgataccgtgttctattggtgagggtgttgttgcaaagctcttanacttgggagctagtatcaatttaatgcctctctccatgtgctggcgactttgagagatagagataatgcccacacgcatgaccctccagttagctgaccgctccatcacaaggccatatggagtcattgaagatgctttggtgaagggttaaccccttatatttccagatgatttcattgtcatagatatataagaagatgctgacattcctctcattcttgg

SEQ ID NO: 14104 - DNA, 393 bp, Glycine max
ccttcataaaagtttatatggctcgaaacaagctctgtttctttgttacaagaagtttaatgagcttatgagcaactcatgattcaatacatgtgacatggaccattgttgctatgttaagaaatatactaatatctatgttatccttaccgtgtatgttgatgacatgtcgattgcaggatctagtatgacagagattaatatgttgaaccatcagttggcagaaaactttgaaatgaaggatcttgtttcaactaaacaattccttggtatgagaattcttagaaatagatcacaaggaattttgaagttgtctcacgaaaaaatatacacaagttgcttgaagagtttaccttgaagattctaagaccacgaatacacttttgggatctc

SEQ ID NO: 14105 - DNA, 455 bp, Glycine max
  unsure at all n locations
gatggcctcagcaaattccttatttccagatggtaattctatcaatagacctccaatctttaatggagagggttaccactactggaaaacccgaatgcaaatttttattgaggcaatagatctaaatatctgggaagccatagaaatagggccttatatacccaccacagtagaaagagtttcaatagatggtagttcatcaagtgaaagcataactatagaaaaacctatagatagatggtctgaagaggatagaaaacgagtacaatacaacttaaaagccaaaaacataataacatctgccctgtgaatggatgaatatttcagggtttcaaattgtaagagtgctaacgaaatgtgggacactcttcgattaacacatgaatgaactacagatgttaaaagatctaggataaatgcactaactcatgagtatgaattatntagaatgaatg

SEQ ID NO: 14106 - DNA, 401 bp, Glycine max
tgtcttcaagataagatgacagcttattaaattgcaacctggcttgcaatcatcaatcaagaggaggccttagcaagacagctataccctgattatatccccccattagcctcagctggaggtagtggatctttggtgatcaatgatagcaatgagtatgatgttgaagggggtgaggatgagcctaactttgacgtggaagactgcaaacatgagaatcttcacacatccaatcttgggatggaaagagtgagggtaactctgccagttcaacagccctctttttcaataaagggagagactgttacaaatctggatttcattcggaagaggaaggtttctaatgacttcgacatgatggatctgaaaatgacacatgtgaacaccctcagagcccttac

SEQ ID NO: 14107 - DNA, 393 bp, Glycine max
  unsure at all n locations
tttgatctttggaaagtaatggaaacaactgaaccttctttntgtaagagaatccaactgttgctcagatcagatttcacagtaagcaagttgccaaaagagcaaaggctcttaccatcttgcactcagttgtggatgatgatgtttttatgagaatttccaacttggatacagcaagggagatttgggagaaacttcaagaggagttctttggaaatgagaggaccaagaacatgtaggttctcaaccttaagagggagtttgaagccttaaagatgaatgaggctaaaaacataaaagatttcatgaccagactgatgaaggttgtgaatcatatcaagttgttagcggagaaatttctatacagtaggatagttgagaaagtcttcgttc

SEQ ID NO: 14108 - DNA, 339 bp, Glycine max
ccacatacaagggagtgaatccagtcaagattgtatgctctttaacattaagagccaagtgtaaaacattgcatatgaaataaaatgaagtcatctccaactatttctctagaattttaacaatcaccaatcaacttaagagaaatggtgaaaatgttgatgatctaaaaactatggagaaaattcttagatagttagatccaaagttcaaacatattgtcgcaatcatcgacgaaacaaaagatttgtaggatataaccattgagaaaattttgggctcattacaagcttataaaaaaaggaaaggatcaaggaataactactcgagacacaagttta

SEQ ID NO: 14109 - DNA, 384 bp, Glycine max
tttttgactgtattccacacaagattataattggattatgctaatgaacaaatgacatatataagtgttaagttaacatataacaactgttacattatatttcattcatgccttaagggtatgtagttatgtacaatactttacaactaaatcacataaaacttctgtcacatagtgtaatcataagataacagttaattattacacaatattttctatttcatgtcaacaagtaccatgaatattgtgacagggcactttcaatagtttggacagctcctttggttgctacattgggcatgtccttgacaattcccattgccatgatagctgacatggttatacatggtcacaagtactctgcaatgtacatccttggatgca

SEQ ID NO: 14110 - DNA, 405 bp, Glycine max
aaagggaaggatagagacttgggaatgatactggatagtggggagggttgctacgtgtgtgtgagggagagagagaatccgacccaggatgattatttccttaaaatatagtgtttacttattatagtgacgttcgagatattttaatgagtttaagatgaattgaattcttccctacaaaacccaaggccaccactcatgagtaataataatattatattttgatgtagcaacaaacttttcactttgaccatgtatgattcattgctcataagtatatattaaggctctagctcctgttcttaatgttcaactcaaccaacacttttaatgttgagttaatctagtgtttaattctgaatttatatagatcattgaataaattgggctgtatctaatctacag

SEQ ID NO: 14111 - DNA, 312 bp, Glycine max
ctcgatatattatgcgcctgaatcggacttccgtgtgttatgtttgaccatttgaatttctcaacagctttcgttgttcaaggttaagcttctcgatatattatgcaccttaatcggactgtcgtttgaaaagttatgaccatctgaatttctcgatagcttccgttgttcaatttcaggcgtctacacatagtatgcacttgaatcggacttccgtttgtaaagttatgaccattcgaatttctcatgagcattcgttgttcaatttccagcgtctccatatatatgcgccagaatcggacctccgtgtga

SEQ ID NO: 14112 - DNA, 437 bp, Glycine max
  unsure at all n locations
agtctcacgattggacatgttgttgcttcttttgttagcagtgggtatacgagacatcttgcctaacaaagtcaggttagccataactcgcctatgctttntcttccatgccatatgtagcaaaagacgtgatgctgtctagtttgatgagctggaaaatgaggctgccattatactgcgccaggtggagatgtatttttcccctactttctttgacatcatgattcacttgattgtgcatctggtcagagaaatcaaatattgcggtcctgtttatttgcggtggatgtacccgcgtgagcaacaaatgaagatattaaaagggtatacaaagaatctatatcatccaatagcatttattgttgagaggtacatcgcagaacaagacgttgaatcntgttataatacattgtagagctaacctgttgccttctgag

SEQ ID NO: 14113 - DNA, 338 bp, Glycine max
  unsure at all n locations
agcttctcgatatattatgtggctgaatctgatttttttttgaaaagncatgaccattggaatntctcgagagcttaggttgttcaatctccagtgactcgatatattatgcacctgaatcggacttacgtgtgacaagctatgaccatttgaatctcacgagagcatttgctgttcaattttgagcatttcaatatattatgcgcctgaatcggacttccgtgtgacaagttatgaccatctgagttcgctaagagctttcgttgttaaatatcaagcttcttgatatattatgtgcctgaatcggacttacaagtgacacgttatgaccatttgaa

SEQ ID NO: 14114 - DNA, 429 bp, Glycine max
agcttctaaactttatacaagaatgaagcttttgtactcatttgttggacaagcggcctcagatatcttaagaaggggggttgaattaacatatcacaaacttttcctaattaaaaaattctattttgattttaacccgtaaccctagattccttaacagtaaactcttaagaaaatatgaaagaaaaacttactgaaaagaaagaataaataataagcaattaaaggagtttaagggaagagagattgcaaactcagatttatactgattcggtcacacccttgtgcctacgtccagtccccaagcaacctgcttgagagttccactatcttgtaaaagcctattacaagatctgaatcacacaaggacaacccttcctttgtgttcagatttctttacaacaagagaccctcggtctcttaatccct

SEQ ID NO: 14115 - DNA, 434 bp, Glycine max
  unsure at all n locations
cctgccgcatgcaagcttgaatcggacctcagagtgaaaagtttgtccttttcaantacncgagagctngcggggggcaatgtcgagcatctcgacatgttatgcgctcgaatcggacatccgtgtgaaaagttatgaccatttgagtttctcgagagctcccgtggttcaatttcgagcatctcgttatattatgcgcccaaaactgaccttcgtgtgaaaagttatgaccatttgaatttctcgagagcatccgatgtttaatatcgagcgtctcaatatattgtacgcctgaatcgcagctcagtgtgaaaagttatgaccatttggatttttcgaaagcttccttggttcaattccgagcatctcgacatattatgtgcccgaatctgaccttcgagagaaaagttatgaccatttgaatttctcgagag

SEQ ID NO: 14116 - DNA, 423 bp, Glycine max
agcttctgttttcaattacgagagtctcgttattctacgggacacaatcggacatcggagtaaaaagttattgtcgtttgaatttgctcggagcttctgttttcaatgtcgagcttcacgatatactacgggacacaatcggacatccgagatataagattttttttttgcatttgctcagagcctatgttttcaatttccagcatcttgatattttaccgccgacaatcattcataccaggaaaaagttgttggcgctagaatttgcaaagagcttatgttttcaatttcaagagactcaatatattacggggcacaatcggacattcgagaaaaaagttatgggcgctagtatttgctaccagcttccgttttcaaattcgagcatgttgatatattacgggacttaatcggacatccgag

SEQ ID NO: 14117 - DNA, 427 bp, Glycine max
  unsure at all n locations
agcttgtagggttaaagtctcacgattgnctcttgctcatgcaacaattgttagccggggctatactagacatcttgccaaacaaagtcaggttcacgataactcgccagtgctttttcttccatgctatatgtagcaaagtgattgatccagtaatgtttgatgagttggaaaatgaggccgcaattatactgtgccagttggagatgtattttccccctgctttctttgacatcatgattcacttgattgtgcatctggtcagagaaatcaaatgttgtggtcctgtttatctatggtggatgtacccggttgagcaatacataaagatcttaaaagggtatacaaagaatctatatcgtccagaagcatctactgttgagaggtacattgcagaagaagccattgaattttgttcagaatactt

SEQ ID NO: 14118 - DNA, 415 bp, Glycine max
agcttgaaattgaacaacggaagctctctttattatgagtggtcataaattttcacacagatgtccgattcggggaaataatatatcgagacgcacgaaattgaacaacggaagctctcgagaaatttgaatggtcataacatttcactcggatgttcgatccggggacataatttatcgagacgctcgaaattgaacaaccgaagctctcgacaaattagaatggtcgtaacttttcacgcgaatgttcgattcggggacataactcatctagacgctcgaaattgaacaacggaagctctcgagaaatttgaatggtcataagttttcacacggatgtccgattcgggaacataatatatcaagacactcgaaattgaacaacggaagctctcgagaaaatcgaatggtcata

SEQ ID NO: 14119 - DNA, 409 bp, Glycine max
  unsure at all n locations
agctntcagcagggaagctaatgtgttttttattctattctacacaggattggtgctgcatactgggtacccaccaatcatacttccactgttgccacaggtttgggtaaatcttctgtatgctgttggaaccaaatcctaatttaatttcggaaactatattgttgatcaaactgctaaccattcataatcttttgctgacaaattacccattgccttccctactgtattgcggggcattatgatgactcaacactcccaatatgttaaactacactgactctgtgatgaagaaagaatctgctctatacctgcataacaaattgtttgaggggacacatgtcccatacattgtctcgacatcaaggatagctgctttacgcgttgtgtccaaagatgccttgattgc

SEQ ID NO: 14120 - DNA, 425 bp, Glycine max
  unsure at all n locations
agcttctacttcttatctcacatacaacttaggtctgtatcacgcgccgcaggtaagaatagncacacaagctttatcatttaaaattatatggtgtgctcttctatatctgtaaatctaatgattttttctgggagggggagattgccttggtgatattgcagatacaagcccatgatattcatgcctgtaatatagtatggctacgtgaaaatgatgaagtgccttgtgaccttgttttgattgtcacctctgatcctcaaggagtttgctatatagaggtaattatgtcgtgaaacatgctaaaactggtcttctctctctgcagcattgcagggaaattggaatgtcattccactattcttctctttttctctcatttggggcagacatnttattatatacattttaaggaccttatgata

SEQ ID NO: 14121 - DNA, 422 bp, Glycine max
  unsure at all n locations
agctntgaggaggctaaaatcaatgtatgtttctgtgattgtgaaatctctaagagtttgaggtcagatggatttaatttgaaattcatcaaagcctcttggagcttactgaaggaagatgtcaaaagatttcttaggaagtttcatgttaatggtgtgttccctagaggtcgcaatgcatcattcatcaccttgatacctaagattgaggatccacaaaatctgggggattttaggtccatttcactggtaggatgtatgtataagatccttgctaaaatccttgcatgaagactaaaaggtgctttggtagtgtgattgacaaaaggcaaatcgccttcttggaagggagaaacttacttcttggagtcttggtggcaaatgaactagttgataaggcaagaagaaaggaaaagaagtgc

SEQ ID NO: 14122 - DNA, 426 bp, Glycine max
  unsure at all n locations
ctgcagcttctgtggaaagcatgttcggttcctagnttatgtgatgattacacaatacttcaagcccttttcagccttgacatggtgattcttttcttagccacaatttgtggacttggtggtaccctcactgtgtcaaataacttaagccagattggcacatctttagggtattcggcacatagtataaccacatttgtgtcccttatggccatttggatctatatgggtaagattgtacagggagtggtctcaaaaattatcatagcaaaattcaaagtccctaggcctatgatattcacattaattcttgtattaccttgtgctggttaccttctaattgctttcgatgtcccaaatggtctctatgcggcctcaattataattgggttctgctttggggctaactggccactactatttacc

SEQ ID NO: 14123 - DNA, 390 bp, Glycine max
  unsure at all n locations
tcttctttctccttattgagtttcattgagtgtgagtgatagcgtgtacgtgtgtgctgcacttccattgtttagatgagtatttgtcttccataattcattatgggaagtgggtttcttaaataagatttatatattctgagttataatttctggtggtaatattataaaaatattaggttagttagtattaataggtattgtaaacttaggttaattacgattaatatatattataaggttaggttagtcactatgctgtttttaatttttatgtattaatagatacttgaaggtangttagttagttcggttcgttgatatatccttagatatatatatgtgatataatattattagctntagaaatattaggcacatgttatatac

SEQ ID NO: 14124 - DNA, 374 bp, Glycine max
  unsure at all n locations
gctgtgcgtcactatccactattgaagcataatacattgcagttggatgttgttgtgctcaaagtctttagatgaagcaacaacatgaagactttggggtaattgttgatcatattccactacaatgtgataacactagtgctataaatctgtctaagaatccaattatgcattcaagaaccaagcatataaaaattaggcatcatttttctaagagatcatgtatctaatggtgattgttgcattgaatntgtggatagtgataggttcttctctattagaaatgagctangaatcctagattagtttaacattgaatgatgttgtgctatggtgtgttcatcttgatatgtgctctntgaatctgtcaattc

SEQ ID NO: 14125 - DNA, 401 bp, Glycine max
  unsure at all n locations
cacaagtaagcttccatcatcctcacacatctccttcatcaatttgttgntcaaactggtggcattatcggtgattatctttctgggcaacccatatctgcaaattatttccttcttgatgaattttaccaccacattcctagtcacattagcatatgaggtagcttccacccattttgtgaagcaatcaatggcgactatgatgaaacgatgcccattcaaaccttgggttcgatagccccaatcacgtctatgccccacatcaagaacgaccatggtgctgacaagacattcaatggcgcaggtggngcattaacattatctacaaaggtttggcgcttggtggcatttctgacgtgaacacaacaatcactctncatggtgatctagtaatacccgac

SEQ ID NO: 14126 - DNA, 408 bp, Glycine max
  unsure at all n locations
gcttatccttgngctatcaatgtgtgttttattgggntatgcctttgacaaaatgggatagaaattatatcatccttcaactcatcgtttttaggtttctattgatgtcacctttcatgaagatgagtcatacttcattcatcctcagcttcaaagggataggattccagaagcctactccttctctgaatccttctttccttctaatggcattcctctatctttgcttcatgagcctgtaccaatgtgcatgtcaatcgaggctaccctttctaatgtgcatgtgatctagcacctcttcttggtgtaccacatgttaaatagataaagtgaacctacctaatgccccgacaccataggtggtgtatcaaaatgagagtggacctatattgcgatgattactatgat

SEQ ID NO: 14127 - DNA, 366 bp, Glycine max
tgttcctctaactccccctgcaacattgcaatcataccattctcaccgctcaaagtgaacactctctacagctgctctactccgaataactctgctggttgccatgtatacaactggagagagaagctttgtgaaatcaataccctgtgtctgctggaagcctttcccacctgtccatccatgtctctctcttctacagccagacttgtactgtagactatacacccaccgattctgttacgctttctttccttctgcgatgttagttaacgaccacgatttgttctcctgaatggatgtcgtctcatatttcatcgctagctaccacttcataaagtcattcccctgtgtagactcactgaaaca

SEQ ID NO: 14128 - DNA, 290 bp, Glycine max
gttcatgtgtttatttgtttattgtctaagtcgtagggtttagggtttaagccttatggtttagggtttagtgtcgaagctgtatggtttaggttttagggcttatggtttattgtttaaggtttaaaccttacggtttagaatttggggtttaatctctaagccttatggtttgggttttacggtttatgagttaagccttatggtttatggcttacggctttgggttatggttgaataaaattactcccacttctatgcatttatgaaataaaactacattataattt

SEQ ID NO: 14129 - DNA, 331 bp, Glycine max
gtcttcctctatagccccatgcaagaatgcaattataacattccactgctcacagggaagattctctacagctgctgtactcacaataactctgatggctgtcatctgtacaactggagagaagatcttcgagaaaacaccttctcgtttctgctgagacactgtcaccacaaggctctccttgtgtcttcttctaccgtcagattctgactttagcctatagacccacctattgtcggacgctttctttccttctggagagttaaataaagaccacgttttattcttctgaagggatgtcctctcatctttcatcgctagctcccactta

SEQ ID NO: 14130 - DNA, 369 bp, Glycine max
taacccagctggccttgaattagaaaattgttcctgtcgcaagggtttgtggtttgtgctcctctgctgaccaccatacagacctttgcccttccatgcagcaacctggagtaattgagcagcctggagcttatgctgcaaacatttacaatagacctcctcaacctcagcagcaaaatcaaccacaacagaacaattatgacctctccagcaacagatacaaccctggatggaggaatcaccctaatctcagttggtctagccctcaacaacaacaacagcagcctgctccttccttccaaaatgctgctggcccaagcagaccatacattcctccaccaatccaacaacagcaatagccccagaaac

SEQ ID NO: 14131 - DNA, 348 bp, Glycine max
  unsure at all n locations
agcttgagataaacaaacgacttatatcttgtactcggatgtcnganagagtcccgaaatatatcgagacgctcgaaattgaataccgaagcgcttagcanattcaaacgacaaaaactttttactcggatgtctgattgagtcccgtaatatatcgaaaagctcgaatgtgaatgtagaagctctgagcaaattcaaacaacaataactttttactctgatgtctgattgagtcccgtaatatatcgagacgctcgaaatggaataccgaagctcggagcaaattcaaacaataataactttttactcggatgtccgatagagtcccgtatatatcgtaacgcttga

SEQ ID NO: 14132 - DNA, 462 bp, Glycine max
  unsure at all n locations
tgcagcttgtacaaatatcgtcaactcgagtgctctttatttgtgagcatgtctgctagttggtctttggagctgacaaaatcagtggtgatttctgctgaaagtaccttctctcgcacaaagtgacaatcaatctctgtgttttgtccgctcatgaaagaccgggtttgaagcaatgtggatagcagcttcattgtcacatattagtccagcatcctgaacatctccaaattntatttgttggagaagttgcctaagccatgtgatctcacatgccgctgctgccatggcatgatacttctgtgtggtttggtgaggttgctgtatggttcgtttgtgtgatctacagctagttgggttgcagtattgcaacatgcagcaggggaagctataatctggtctggtgtggtgcagcttaanaaaaagtgcatgtgngtggtattatacattgtgctgcaactt

SEQ ID NO: 14133 - DNA, 364 bp, Glycine max
  unsure at all n locations
gacaaacagctgtatgctatggtaagagctctgccaacatggcaacactatttatggccaacggaattcataattcatttcgaacaccaaagtttgaagtttctaaaatctcaaggtaagcttcaaaagagacatgccaagtggctggaattcatagagatgtttccttatgtgatcaacgacaagaatggtaaagaaaacataatggttgatgctttggctagaaggaatgctntgcttacttctttgcanactaaattgcttggatgtgagtatagaaatgacttgtatgctaatgaatctgactntgacaaaggatgggattcttgtctacacatgtttgtgggaatattatgacacaatg

SEQ ID NO: 14134 - DNA, 127 bp, Glycine max
ttcattcgagagtatactctctcatcatactcatgagatttctagtgcctgctctgatacccacagagattctgattctgaggacagacgtcggaccggatgtctcgtcatcatgcttcacaacatg

SEQ ID NO: 14135 - DNA, 488 bp, Glycine max
  unsure at all n locations
atgcgaaccaagaagaatgaaatgaacagaagacgttgttgggattatcgnctacgggccttaaacagagaaacgaatcaaggacctaaaaagggattattaaagaggttaaaanaacggaaattgttaaacaagaataacataataacagtattttacttgagtcataacataatntcttttatatttattatttgataatcgatacacattataagtatttagttntactatttatattgtttactagatataaaacttagacggaatatacgcgttaaccgtaaaaatcataaaaatgtctttcgatagataattatattntcatgctagaatttattgacaaatacgaattttttttatcatgaatcactaaaattatattttgattgtaagttttttttatcaaatatataaatttcaacttaagataattgttatatgttgacaaaatagtattataattcgatatatatctatataaagat

SEQ ID NO: 14136 - DNA, 463 bp, Glycine max
  unsure at all n locations
agctngaagcgagagttaaatgagatctcttnttggccaatatggaactccttcctaagaatgctagagtcatgaaacctcttcactttctccttgtaaatcttggagttctcataagcctctaagcggatatcctcaagttcttgaaatcgaagcttcctttccatacttgcttcatcaaattccatgttacaactcttcaccgcccaataagcatggtgctcaatctccaccagaaggtggcatgccttaatgaaaaccaccttatagggagacatccctaaaggtgtttggtaagcggttctgtgagcccatagagcnatttcaagtagcttgctccaatccttcctattgagctacattactttctacaacacttgctngatctctctatttaaaaccttcacttgcccaatagttgggggatgataagttgtagcaactctatgcataaccatattct

SEQ ID NO: 14137 - DNA, 415 bp, Glycine max
ctatccaatactcaagcttgacaagaaagcagaacccggaatatctgtgggttatagtcttacttcataggcctactaaatctacctaccacagagaaacatagtaatcgtcagcaaggatgtcaaatatttggagtcagatagttgggactggaaaaatgataagaggtctgagtttcatgaggagaatgatgatgttgatgaacaacccatcatatgaaccagatcactttcagacatctatcataggtgtaatgttgttgtaatggagcctgagggatatgaagaagctacagctgatcagaaatggagaaatgcaatgaaagaggagcttataatgattgataaaaataaaacatgggagctggtggacagacctaaccacaagatagcgattggtgtcaagtgggtttat

SEQ ID NO: 14138 - DNA, 330 bp, Glycine max
  unsure at all n locations
gcttcaacatcagaccacttncattgtgcttgaactacttcacatggacttgatggggcctatgcaagttgatagcctaggaggaaagatgtatgcctatgttgctgtggatgatttctccagatttacctgggtcaactttatcagagaaaaatcagacacctttgaagtattcaaggagttgagtctaagacttcaaagagaaaaagactgtgtcatcaatagaatcaggagtgaccatggcagagagtttgaaaacagcaggtttactgaattctgcacatctgaaggcatcactcatgagttctctgcagccattacaccacaaca

SEQ ID NO: 14139 - DNA, 401 bp, Glycine max
  unsure at all n locations
cagaanataatttccaagagtcacatctgttgccatcaaaggtctatttatatgtgacatagaacacgaatttgcgaagagtttttgagaacaaaaaggtcttatcctctcaaaaaaagaaaaattatcttatcctcttaaaaattccttggccaatacacttgcaattcaataagggaattatttgagtgctccattgttcaatctatctctttcaagagagatttcttcttctcttcatcttatttctaaaaagggattaagagaccgagggtctcttgttgtaaagcaatctgtacacaaaggaagggttggtccttgtgtggtcagaactngatgcaatactaccccgcaagggcattggatagaagactccaagaagattgagccagagatgcaag

SEQ ID NO: 14140 - DNA, 432 bp, Glycine max
  unsure at all n locations
actcagctaatattgtaggcttcttccttgtgtcaacttgtcaaattgtgccctcttactaacaaagaggataggcttatatgcataagtgtccctcacctgagaagtgcttcacaggcaaatgctcttccagtcattggagtcaatcttgtagaaagcataatactcctcctttgtgatctcctaaggctctgtcatccaaatggccttatccttctttttgtaagtgggaaaacaaagtcctctataggtttccccctcacgaaggatttttcctttcacagcaaactaatgttcaatntacgaatggtaaccggcagatctgaatgaatttccttaccttaagtcttcctaattttttgtcactaactaactctaaaactaatattctaattatccctaattaactcccccttcctacggtcctaatgg

SEQ ID NO: 14141 - DNA, 339 bp, Glycine max
gctatgcaaaatcatcaaaggatagcagctgctgactcagattctggaacaaatgttgctgggaatctatcaaacaaactaaaatagcagaaaaaaaaggattcggccctgctatcagatgatgttgagatgatgagatcctcatcaccggagtcaagttcccccaaaaaatgcatgcattgtgaggtgacaaaaaccccacaatggagagagggacctgtgggtcccaaaacactgtgcaatgcttgtggtgttcgataccggtctggccgcctctttctgaataccgaccggcagctagcccgacttttgtagcatcactgcactcatactgtcaca

SEQ ID NO: 14142 - DNA, 432 bp, Glycine max
  unsure at all n locations
ttgattcaaccgagcattaaataacatgatcaatgtgcagatgcaaatataactaaaagtatagggttatattttacctcgaggagaacatcctgtgactcatccaagacaatttcatctaaattattaccaactactattttcacatcaccatcattctgtttccaagttaccatacacgttaagcatgaaaaactaaattaatatgacataattgacggtgggaaaattaaataacatacactttcaggaactggatctgacttgtaaaaaggtgttagctcgtcttcaacgaaatcttgcccaaatgcctgtggaaaaatgaagattagaacattactcaaaatattgctntcacacctctattaagtgatagataaaccatccatgcacattctctatcattaacatgttagcaatagtaacagaacc

SEQ ID NO: 14143 - DNA, 408 bp, Glycine max
  unsure at all n locations
tcggatgtctgattgagtcccgaaatatatcgagacgctcgaaattgaataccgaagcgctaagcaaattcaaacgacaataactttntactcggatgtctgattgagtcccgtaatatatcgaaaagctcgaatgtgaatgtagaagctctgagcaaattcaaacaacaataactttttactcggatgtctgattgagtcccgtaatatatcgagacgctcgaaatggaataccgaagctctgagcaaattcaaacaataataactttttactcggatgtccgatggagtcccgtaatatatcggaacgctcgaaattgaatgctgaagctctgagcaaattcaaacgacaataactctctactcggatgtctgattgagtcccgtaataaatcgagaagctcgaaa

SEQ ID NO: 14144 - DNA, 408 bp, Glycine max
  unsure at all n locations
ataacaccaagaatgactatctactcccactaaacttgtggtatacacaatcatcaactgcatttgcctcaaaaccatatgatgtaatgacttgatggaacttgtaataccattgacgggaagcttgtttcaaaccatagatggatttatttagtttacaaaccatagactttgagtcacctgatacaaagttntctggttgcatcatataaattagttcttcaatgtcaccatttagaaatgtagtcttaacattcatttgatgtagctctaaatcataatgagctaccagtgccattattggtctaaaagaatcctttgaagatactagagaanaggtttctttatactcaatgccttcctttaggtaaaatctttatggactagatgagccttatatctctcgac

SEQ ID NO: 14145 - DNA, 409 bp, Glycine max
  unsure at all n locations
tccttcttatcatgagataagagttccacttcttaccaaggaattagagaatacagaaattntgttgaaagaccataaggagcaatggggaagaattggatgttcaattatgtctgatgcatggacagacagaaaacagagatgtatcattaacttcttgatgaattagccgttttgattattccttttctatacaacaatagatgcatccaattttgtgaaatctggagaaaatatatttgagttgttggactctattgtggaagagaatgaagaagaaaagggtgtccaagttataacatacaatggaagcaactatgttttggcaggtaattactcaacaaaagatgcacatttatattggactccttgtgcagccactgcatagatttgatgttggaagacattg

SEQ ID NO: 14146 - DNA, 446 bp, Glycine max
  unsure at all n locations
cagcttacgccttaatcaattataaaaaatttttataatcatgtttcacaattgaaataatcagggttacttaagtgattattttataatttttaatagataaatgactaaattataagttaaaaataaagttaaagaaccaaatgagtaatttaatcaaataattgtgatgtttgaaaacactcacaagacttatatattntaattttgataattcattaagatataatggataatattaattcttctcacttttgcattaaaacattctcactaaatatttcatcttctctctttcacataaaaagcaaaaactcgctagatagagagagaggacttaaatttgngtttgataaaatctactgtgaagcttattaaaatatctataagaatcataaatcattctaacaagcttaacaaaatacatactcattattactataatc

SEQ ID NO: 14147 - DNA, 375 bp, Glycine max
acggagttttccgactatgttcttgtgtggtggaacaagctacaaaaggagagagcaagaaatgaagaggcaatggttgatacatggacggagatgaaaaagatcatgaggaagcggtatgtgccggctagttactcaagggacttgaaattcaagctccaaaaactaacccaaggcaacaagggggttgaggagtatttcaaggaaatggatgtgctcatgattcaagcaaatattgaagaagatgaggaggtaactatggctcgatttcttaatggtttgactgatgatatccgtgatattgttgagctgcacgagtttgttgaaatggatgaattgcttcacaaagcaatccaagtggagcaacaattaaaa

SEQ ID NO: 14148 - DNA, 397 bp, Glycine max
  unsure at all n locations
gcttctgttctgaatctcgagcttctcatatactactggaaacaancggacatccgagtaaaaatgttttgttgtctgaattntctaagaggttatgatttcaatcttgagcgtctcgatatattacgagactcaatcaagcatccgagcaaaaagttattgtcgctaaatgtttcttacagcttctatttccgattatgagcgtctcgatatattacgagattcattcggacatccgagtaaaaagttattgtcgcttgattttgctcaaagcttctgttatgaatatcgagtgtctcgatatactacgggacacaatcggacatccgagtaaaaagttattgacatgtgaattgctcatatcattcggtgtcaattacgagcgtctagatatatt

SEQ ID NO: 14149 - DNA, 160 bp, Glycine max
  unsure at all n locations
atcagagagagaacagacacctttgaagtattcaaagagtngagtctaagacttcaaagagaacaagactgtgtcatcaagagaattatgagtgaccatggcagagagtttgaaaaccagcaagttacttgaatctgcacatctgaaggcatcactcatg

SEQ ID NO: 14150 - DNA, 473 bp, Glycine max
  unsure at all n locations
tgtaacccaccatcttcgcatagtagaacaccgattacgtgtccactatcattgttatcatctccctctccatcattgggggcactacttgagctgccagatccctccacctttgggcgtattctttgaaagattcatgctccctcttacacatattttgcaggtacattcaatcaggagccatatcagaattggactaatgctgcctaataaaggcaaccattatgtctttccaggaacgaacccgggaagactccagattggtgtaccaggtggtggctaccccagtaagactttcctagaagaaatgcataaancaattttcatcttttgcatatgctctcattttcttgcagtacatcttcaagtgattcttggggcaagtagtccccttgtacttatagaagtctggcaccttaaacttcggaggaatgaccatgtcgagcactaagcacaaccttgccatgtcaaca

SEQ ID NO: 14151 - DNA, 431 bp, Glycine max
tggatctcctttagtagggaatctatccttcctaagatgtgagccaacctaatccccctaattaagaactagctcatttcttcctctattgctcttagttgaatacgcctttgtttggttctctatttaggtcttaaccctctcatgcaacttttttacaaactctgacctagattcgtcttctttatgtataaaagaagtgtcaagtgggagggaatgaggtctaagggtgttaggggattgaacccatatacaacctcaaaaggggattgcttagtggttctatgaaccccccctgttgtatgcaaattctacatgaggaagatactcatcccaagacttatcggtgcctctcagaagatcccataatagggtggataaggacctattcactacctctgtttgcccatcagtttatggataacaagtgg

SEQ ID NO: 14152 - DNA, 477 bp, Glycine max
  unsure at all n locations
tacggacactatgaaactcagcgttgctacccaaggaaccatcaggaaattacttgtgaatgagagccatgagggtgggctcatgggccactttgggatagacaagacccttgtcttactcaaagaaaagttntattggccccatatgaagaaagatgtccataagcattgcactaggtgtgtggcttgtttacaagccaagtctagggtgatgcctcatgggctatacacacccttacccattccatctgcaccttgggtagacattagtatggactttgtccttgggctccctagaagccaaagaggtgtagactctatctttgtagtggtggataggtttagcaagatggcacactntataccatgccacaaggtggatgatgcttcccatatctcanaactctnttttagtggaagtgtgagactccatggtttgcctacgaccattgtgtcagatagagatgctaagttcct

SEQ ID NO: 14153 - DNA, 414 bp, Glycine max
gctagaacaccgcctcatatgctgagaacaccacttattatggaccatcatgttggatcagcaccagttgttacagcctcgccctgtgaaaggcaaaattcttactttggagggtcccctgacgcttctggttttcgcttgggttctctaggaagtggaggttttcatggttcctggcaaatgcatccactggatataccttctcacaacatgttatctcatgttgtggggaatgtgtccgaactgacaaccaatgctgggcataactctcctaaacaactatctcatagtttcccatagagacatgctatgtcttctatgactaaacttgatgctctcaaagaacgctttataaaccttctaactcctaaaatgaatctagcaccaacaatgcttataaaaaactgtatgaac

SEQ ID NO: 14154 - DNA, 427 bp, Glycine max
  unsure at all n locations
catacaatactcaagctgggacttnctatgttctgggaacctctgcgtacttaggtgtattttaacccaatcacctggttcaagcatgactatctttctgcttgagttggcttgccttgcatatctcacagttttcttttcaattcgagccttcacttgctcatgcagcttcttcacatactcagctgtatcctgtgcgtccttatgcttaagcatatcaatgttatgcataggccacaaatcgagacgaggcaaatgatataatccgtacactactttaaatggtgaacaattagttgtgctatggacaggcctattataagcaaactcaacatgaggcaaacatcgttnccaagatgtaagaattttctttaaaacagtcctaaacagtggacctaaaatcctatgactaccacaggttgaccat

SEQ ID NO: 14155 - DNA, 445 bp, Glycine max
  unsure at all n locations
ntgagaatatggttgcagccattggtcaatatgggccatatttgcccattcatagctatcatgacattagagttccactcctgaagaaggaagttgaatatactgaaaatttgatgaaaggctatagggagcaatgggtcaagtatgtttgtactattatgtccgatgcatggactgatcggaaacaaagatgcatcattaattttttgattaactctcaagctggtaccatgtttntgaagtctgttgatggctctgattttgtaaagacaggtgaaaatctttttgagttgcttgatgccattgtggaggaagttggagaagcgaatgttgttcaagttgtaaccaataatgagagcaactatgttttagcggngaaagttgtggaggagaaaatgaaacatatttattggactccttgtgcagctcattgtattgatttgat

SEQ ID NO: 14156 - DNA, 474 bp, Glycine max
  unsure at all n locations
ngaatagannattttgggctgaggcagccagttcaacattctatctcatgaatcactcaccatccaatgccataggcttcaaaacccctattaaggtatggcctaacaaaccaactaaatactcaatgttgaaggtgtttggatctttggcatactatcacgtaagtgaaggtaagctagagtatagagccaagaagggattctttataagctttgttgatgaagtcaaaggattctaagtctggtctccatttgaaataaaagtcattctaagtagagatttcatctttaatgaattctctatgatgcattctaaatctgatgaagatttgggaaagcctgaggatgtcactaagcaagtggagttcgagatctcaataatcaggaacattagngatcagaagcaatttaaagcacctgatgagactgatcagaatcttcaaattcaccattaacatcatagtgaacaccaat

SEQ ID NO: 14157 - DNA, 409 bp, Glycine max
  unsure at all n locations
tttgttactcaatttcgagcgtctcgttatatatgttctttattcggacatgcgtgtgaaatgttatgatcatttgaatntctcgagggcttctattgttcaatttcacgcgtctcgatatattatacgcctgaatcgcacatccgtgtgaaaagttatgaccttttcgatttctcgagagcttccgttgttcaatttcgagcgtctagatatattatgcgccagaatcggacatccgtgtgaaaagttatgaccatgtggatttatcaagagcttctgttgttaaatttcgagcgtgtccatatattatgcgcttgaatcggacatccgagtgaaaagttatgaccatttggatttctcaagagcattcgttgatcaatttcgagcatctctatatattatgcacctg

SEQ ID NO: 14158 - DNA, 429 bp, Glycine max
tcaagaatcaagatcaatattcaagattcaaggttcaagattctcaagagaagacttaatcaagataagtatgaaaaggatttttcaaaaactgagtagcaaatggattttttacaaaacatgtttaccaaagagtttttactctctggtaatcgattaccagtagcaaaatgtttttgaaaaagttttcaaattgaatttgcaacattccaattaatttcaaaaagctgtaatcgattacaatgttttggtaatcaattaccagtgcatttgaatgttgaaattcaaatttaaatgtgaagagtcacatcgtttcacataaaagccttgtgtaatcgattacactaatttggtaatcaattaccagtgactatttctgaataaatcaaaagatgtaactcttcaaatagtttttttactttttcaaat

SEQ ID NO: 14159 - DNA, 229 bp, Glycine max
  unsure at all n locations
gacaacaacctcagcaccaggtttgacaatatctgtcaatgagatcatgagactccttccgtccaaggtggtgagatccaacgttntaccagtaagggcctcaagaagggttatctcttnggtgatcaccaaatcattaccatcccttctataaagagcatgcggcttctcatctatcacanaaatgagatctgctgggatgacaccaggctcacggttacctttctct

SEQ ID NO: 14160 - DNA, 375 bp, Glycine max
tcactcggttgttcgtattcaggagtatcacatattgagacgctcgaaattgaacaacggaagctctcgagaaattgaaatggtcataacttttcactcggatgtccgattcaggcgcatcacatatcgagacgctcgaaattgaacaacgggagctctcgagaaattcaaatggtcataacttttcacacggaggtcaaattcaggcgcatcacatatcgagacgctcgaaattgaacaacggaagctctgaagaaattaaaatgctgataacttttcactccgatgtccaattcaggcgcatcacatatcgtgacgctcgaaattgaacaacggaagctctccaaaaattcaaatggtcataacttttcacac

SEQ ID NO: 14161 - DNA, 421 bp, Glycine max
  unsure at all n locations
tcagaacttctgtagggtttcagggctttccatcagtctcttattaatctgccatatactcagccggtattaggcctcatgagctttctcatattcagcagcttattggatttagcttgggtgacttccctttcagatacttaggtgttccccttttatcatctagattaaatgtatgtcattatgctcccttgctttccaagattactgtcctgattcagggatggagcaaaaagtctttatcttatggaggtaagttagagttgatcagagcggttattcaaggaattgtgaatttctggatggggatttttcctttgccgcaatctgttctggactggatcaacgcttcgtgccgtaattntctgtggggcaaagcggatattggcaaacacaagcccttggttgcttggtcagtagt

SEQ ID NO: 14162 - DNA, 463 bp, Glycine max
  unsure at all n locations
ttcatgcaggtggaccttcttctagttattatgacttaccacaatcgtctttccctcttccattcccacctagagcaattccaaacaaaaaaatggaagaagcggaaaaggagatcttggagaccttcaggaaagtagaggtgaacatacctctgctagatgccatcaagcagattccaagatatgccatgtttctaaaggagctgtgcacccacaaaaggaagctcanaggcaataaaagaattagcatgggtagaaatgtgtcagcattgataggtaaatctgttcctcacattcctgagaaatgtaaggacccangtactttctgtataccttgcattattgggaacaataaatttgagaatgccatgctagatctangagcatcagttagtgtcatgcctctgtctattttcaatttnttatctcatagaccctngtaatctacagatgtggtgattca

SEQ ID NO: 14163 - DNA, 433 bp, Glycine max
cttgatgcaacagttggagaggttaatggaagaaggatatgttgcgctccatgagaggttggatcaaatggagaatagagatcataatgaagaagaaaggaggagaagagggaatgatgatgttcctagacaaaaccgaattgatggtattaaactcaacattcctctctttaaaggaaagaatgatccagaggcctacttggaatgggagatgaaaatagagcatgttttctcatgcaaaaactatgaggaggaccaaaaggtcacgcttgccgccacggagttttccgactatgctcttgtgtggtggaacaagctacaaaaggagagaacaagatatgaagagtcaatggttgatacatgggcggagatgaaaaggatcatgaggaagcggtatgtgccggctagttactcaagggacttgtaatcaagc

SEQ ID NO: 14164 - DNA, 475 bp, Glycine max
  unsure at all n locations
gaagctcctgttntagctntacccgattntactctttcatttgaagttgaatgtgatgctagtggagttggcattggggctgttttgatacaaaacaaaaggcctatagcttatttctcggagaaattgggaggagccagattgaactattgcacctatgacaaagagttctatgccattgtgagagctcttgatcattggaatcattatttgcgttctaatcactttatattgcattcagatcatgagtcattgaagtatatcaatgggcagcagaagttgagtccaacgcatgctaaatgggttgaatntcttcaatcttttaatttctcttcaaaatacaaggatggtaagagtaatgtggtggctgatgcactctcaaggaggtatgctttaatctcaattcttgaaactcgttacttggtttgagacttgaaagatatataaagaaatgtggatttggtgaaatactcta

SEQ ID NO: 14165 - DNA, 446 bp, Glycine max
  unsure at all n locations
ctaagctccaccattttgtagggtttcagggctttccatcagctctgtttaatctgccatatactcatccgatattaggcctcatgagctttctcatatttagcagcttattggatttagcttgagtggcttcccttttagatacttgggtgttccccttttatcatctagattaaatgtatgccattatactcccttgctttccaagattactggcctgattcagtgatggagcangaagtctttatcttatgcaggtaagctagagttgatcagagtagttattcaaggaattgtgaatttctggatggggatttttcctttgcctcaatctgttctggatcggatcaacacttcatgtcgtaattntctgtggggcaaagcagatattggcaaaaacaagcccttggttgcttggtcagtagtttattctccgacaaaagaat

SEQ ID NO: 14166 - DNA, 492 bp, Glycine max
  unsure at all n locations
tggacagcatcaaccttggccattctaaaatcttcctttttcttatcagtgccctctntaatgtatgcagctggttcagtaatatttgagtccatgccattgatgtttaccccaacatggtttccttcagtgtctgagtcatctttgtaaccattcattgtgtcaaactcaactgcaaagatgtggtttgactcattcccatcattggtggagttaacaaggccaagataatggccagcctcagccccaggaaactgtgttgagggtgctatggtgaaggcaaggccaaagccaccagaaccagaacttgtggacacaattgagaaaacaaaattggtgctgaaggaataagcatatggttggtttgtgttgttaagcatttggaagggtgtggcatagaatgcatggcctacaatattggttgatctgttggtgagtttaagtaaacggctggttttgatgatggaagatccttcaagaatgagttcactg

SEQ ID NO: 14167 - DNA, 209 bp, Glycine max
  unsure at all n locations
gagaatgtcatggatcactgtatataccanaaggtcagtgggagtaagatttgtttccttgcattatacgcagatgatattctgcttgcgactaatgataagggtatgctgtatgaggtganacatattctctcaaagaactttgatatgaaggatatgggagagacatcttatgtcataagcatacacatccatagagaaagatctcg

SEQ ID NO: 14168 - DNA, 345 bp, Glycine max
tcctccaaccacgagttggagccatgcgtaggggttttttgtgcttttctccattctcaatctttttgcgaagccccataaattgcgttttcgttcatgcgacctccacccacgagtttggagacatgcgcaatgattgcttaatgcaattctccattctcaatcttttttcggagccccatgaattgcgttttcgttcatgcgtcctccacccacgagtttggagacatgcgtagtgattgcttagtgcaattctccattctcaaccctttttcggagccccatgaattgcgttttcgttcatgcgtcctccaaccacgagttggagccatgcgataaggttgc

SEQ ID NO: 14169 - DNA, 440 bp, Glycine max
  unsure at all n locations
tatgttgcaaaatntataatagacccccttattctatgtttccaacaacaacaaaataattatgatctttcaagcaacagatacaatccaggttagaggaatcatccaaatctgagatggacaagtcctccacaacaacagcagcttgtccctccatttctgaatgttgctggcccaagcaagccatatgttcctcccccaatgcagcagcagcaacaacaacaaaggcaacaagcaactgaggatcctcctcaaccttccttagaagagttagtgaggaaaatgaccatccagaatatgcaattttagcaagagacaagagccttcattcagagtctgacaaataagatggggcagatggctactcagatgaaccaagctcagtcccaaaattctgacaaattgccttcacaaactgtccagaatcccaaaaatgtgag

SEQ ID NO: 14170 - DNA, 408 bp, Glycine max
  unsure at all n locations
cttgaggaaattcaaacgacaataccttgggactcgtatgttgtattgagtcacgnaatatctcgagacgctggaaattgaataccgaagctctgagcaaattcaaacgacaataactttttactcggatgtgcgagtgagtcccgcaatatgtcgagacactcggaattgaataccgaagatatgagcaaattcaatcgacaataactctttactctgatgtcggattgagtcccgtaatatatcgagacgctcgaaattgaataccgaagctctgagcaaattcaaacgacaataacttttgactcggatgtcggattgagtcacgtaatatctcgagacgctcgaaattgaatactgaagctgtgagcatattcaaacgacaataactctgtactcggatgtgcg

SEQ ID NO: 14171 - DNA, 304 bp, Glycine max
  unsure at all n locations
cacacttgagctttgtagctactatatcaaataagtgtaataagatatttgtcttttttttctgaattctcacatcaatgcaactatntgatgaattataagtaaaataatctggaattaanaagtataatagtttaaatctttntaacaatattctttttaatatttataaaaatgaaatananacataaaattttattcctggttatntaataaataacaaagaataataggaagatgttataataaattagctcataatttattattactcttaatagatgtggagaacattcaaaattat

SEQ ID NO: 14172 - DNA, 406 bp, Glycine max
  unsure at all n locations
agcttgtanggttaaagtctcacgattgtttcgtgctgatgcaacaattggtagcccgggctatacgagacatcttgccaaacaaagtcaggttagcgataactcgcctgtgctttttcttccatgctatatgtagcaaagtcattgattcagtcaagtttgatgagttggaaaatgacgccacaattatactgtgccagttggagatgtattttccccctgctttctttgacatcatgattcacttgattatgcatctggtcagagaaatcaaatgttgtggtcctgtttatctacgatggatgtacccggctgagcaatacatgaagatcttaaaagggtatacaaagaatctatatcgtctagaagcatcatggcagaacaagctagacatgtattttacgtg

SEQ ID NO: 14173 - DNA, 455 bp, Glycine max
  unsure at all n locations
agctnggcaaacatagttgacacagaaggtttttctcctctatatagaagcatnaaatcattggcaaaagccaaatgagatagctgaatacctgcacagtttatatataaatttaaaattggcataatccttgaggctgctcatatctctagaaaattactccaaacaaagcacaaacagataaggggagagaggatccccttgtctaagaccccgctgccctttgaagtggccataaatggatccattgactgccgcactaaaggaagtggaagaaacacattccatgatccaagtacagaactgggctgggaaaccaatggacttaagcatccaatccaagaatttccatgaaatggaatcataagctttatgcaagtcaattttcaggaggcatctcgaagaggatcttttcattcatatntacgcaaaatatcttgaactaggaagatgtc

SEQ ID NO: 14174 - DNA, 399 bp, Glycine max
  unsure at all n locations
agcttgttgagaaattgtacaaactttaggtatttgtttggcatgctattactagatttgccacttcttatctaaccttagaaaggctccacaaagagaaaactaatattggaaagatgnttattttttatgaatggatcttaaacaagttatctaaggagcttaaggggaaagaagctgtaaaggtagtgctcatgccttctttttggaatagtgtggtttacactcttaaagtcatgggtccacttgtcaaagtgcttcgtcttgtggatgatgaaaggaaaccatccatgggttatatctatgaagcaatggacaaagcaaaagaaataattaacaagtctttcaacaaccacgaaagcaagtacaaagatgtgtntgcaatcattgattaaagat

SEQ ID NO: 14175 - DNA, 397 bp, Glycine max
  unsure at all n locations
agcttaattcccaaaatcacatctacttgattcttgttcttttatgncaaagnttctaaacaatatggacttgacatcatttatgagggcatttacaatctttattgntgngncagccagatacaaacataaaatgacacatccattatcataaaaaaatttcacatacacacatttatcactatcattaatttgaaaatcatacgaaagaataacttgatcaaatttgtgtgtcattactttagggcttgtttcaaaccatataaagatttaacaatttatttttcaaggaaaaacattttcaaagaaagtgacatctctagatttcataatagtaccattagaaatttcagacatttctaaattaacaactaagaatctataagtagtattatgt

SEQ ID NO: 14176 - DNA, 310 bp, Glycine max
gatagagccaaacccaatccccctcattaaaaacaagctcctttcttcctctattgcccttagatgaatacaccattgtctggttctctatgcgggtcttaaccctctcatgcaacttttttacaaactctgacctagattccccttcttcatgtataaaaagaagcgtcaagtgggacgggaatgaagtctaggggtgttaggggattgaacctatagacaacctcaaaaggggattacttagctgttctatgaacccccctgttgtaagcaaatactacatgaggaagatactcatcccaagacttat

SEQ ID NO: 14177 - DNA, 350 bp, Glycine max
  unsure at all n locations
agcttctagaggttgtgcttatctattccttctctgacagtgcgtgggtaagcccagnacaggtagtttcaaagaaaagaggaatgacagttgtccaaaacaagaagaatgacttgatacccactcggactgtcactggctggtgaatatgcatcaactaccgcatgctgaatgaagccacaaggaaagaccactttcctctgcccttcatggatcagatgctggaaaggcttgtgggacaggcatactattgtttcttggatggatactcatgttaactaaattgtggtggaccccacggatcaagagaagatgacctttacatgcccttttggtgtctttgcctacag

SEQ ID NO: 14178 - DNA, 275 bp, Glycine max
gcagtaatatatacacaagttactcggaataactaacttataacttactaacgtggagtataagaactgaaaagcacccggcatgagtgctttggtgtatatatatgcaagttgattagcagaagttattggaagcaatttgacaagctcgacaaggatcttcttttgaacgatatgacaatcaattttgatatgttgggtcctttcatgacacacacgatttgtagcaatatgtaaagttgactgggtatcatatgacaaaatagcaggttgat

SEQ ID NO: 14179 - DNA, 403 bp, Glycine max
  unsure at all n locations
catgcaagcttctcttctaatatagaagcagctgatatacttttttttatcaggaatngagaagctttcactgttaacatgataattctgtttttgcacagcttttacagcagctactctagctgcattggctgctctattagaagctgctacagctctgttcaccccttcatctaccttggccatatcataggctttctctgcggcttgtcttgcttcctattttttaaacaaataaacacaattttataatgaaaattgactcataatgctgtaaaatatctaactgtctgcaattcttttcttctcctccattacaaggttgagctaattttatgcacaaaagacaagacatccaaattctgcatgtagactgtatccngacttcaataaaatttggttt

SEQ ID NO: 14180 - DNA, 287 bp, Glycine max
gctccaaaatttggctacacaaattcaatttcaaattcaagtgatatctgaatagaaattcagatttccccccaattttgtgtgacacttaagctataaatagaggccatgtgtgtgcatttattaaactttgatcatttgagaaattacacttcaaagttcagacctcatttgaggcacacaatttggggttctttctctccctctgcctccactcatcttctcctaccttcaagctcttatccatggctccttatgttggtgagccttctcttgactcatcctct

SEQ ID NO: 14181 - DNA, 430 bp, Glycine max
  unsure at all n locations
agctcgccgccacagagttntccgactatgtcttttttgtggtggaacaagctacaaaaggagagagcaagatatgaagagccaatggttgatacatggacggagatgaaaaagatcatgaggaagcggtatgtgccggctagttactcaagggacttgaaattcaagctccaaaaactaacccaaggcaacaagggggttgaggagtatttcaaggaaatggatgtgctcatgattcaagcaaatattgaagaagatgaggaggtaactatggctcgatttcttaatggtttgactaatgatatccgtgatattgttgagctgcaggagttcgttgaaatggattatttgcttcacaaagcaatccaagtggagcaacaattaaaaaggaagggagtggctaagaggagttntaccaactttgattctt

SEQ ID NO: 14182 - DNA, 436 bp, Glycine max
  unsure at all n locations
agctgtgaatgctctattcaatgggagggataagattattttttgactgancaacacatgcacaggggccaaggatgcatgggagatcctgaaaaccactcatgagggaacctccaagtgaagatggccagattgcaactattggctgcaaaattcgaacatctgaagatgaaggaggaagagtgtattcatgacttccacatgaacattcttgaaattgccaatgctcgcactgccttgagagaaaagatgacagacgaaaagctggtgagaaagatcctcagatccttgcctaagatattagacatgaaggtcactgcaatacaggaggccctatacatttgcccatgagaganatgaactcattggttcccttcagacctttgagctatgactcttcgatgggacgtgaaagaaagcaagaatctggcgctcg

SEQ ID NO: 14183 - DNA, 356 bp, Glycine max
agcttcactatttcaccatccatattttttttctgtttataatcaaacccttcatgaatttagcatatgttggcatctactctaacgcctcagaaaaaggaatgttattatgcaattgtttaaaagtatctataaaacgcttgtactatttttccttatctttctttgacagagcatgctgataacgatgatgctcaactggtgaatggtttactatagctttaccattattagtggtttgttcatttgatttcttcttctctttttcacttaccactatttcactggtcaccactgcatcatttttctaacgttcttcttcagctccttctttattctttttctcatcattaatt

SEQ ID NO: 14184 - DNA, 440 bp, Glycine max
  unsure at all n locations
agcttattctgtgccatagtgctcntgttggttatctctaataggcttctctctgtaggaatatgagtctgatcatgtaaaatagcatgatcactagcagccatattctcaataagctccatagcttcttcaggggtcttcaatttaatcttccctccaacagaagcatccaattactacttggattgtggtctcaaaccatctataaaaatatttagctgaattggctcagagaatccatgagttggtgtttgtcgtagcaagctacggaatctttcaagtgcttcactcaaagattcatctagaaattgatggaatgaggagatagctgccttgccttcagctgtcttaaactcangaaaatatttcttcaaaaatttctcaacaaccttatcccaagtcttcaagctatttcccttaaacgaatgcagccacctatt

SEQ ID NO: 14185 - DNA, 313 bp, Glycine max
  unsure at all n locations
actatcactagacctgangatatgcttgcagtgaacaacgtttgccaattcatggcaaatcctttggatacttcatggtcttcatcttaagacagctatttggggctttgtgatgcagactgggaatctgatatagatgacagaaggtctacttcatgcgcacccatctattttggtcctaatctaatatcctggtggtctggcaagcagcaagttgttgctatatcaaccacagaagcacaatatataacgttagctcagactactgcagacatatcctggattcacaccttattaactgaattaagagtct

SEQ ID NO: 14186 - DNA, 239 bp, Glycine max
  unsure at all n locations
tgaacctatgctganatattacaatagacctcctaacctcatctcanaatattcccagcagagtcaatatgacctgtccagcaacagatacaaccctggatggaggactcacnctaacctcagatggtccagccctcagcaacaacaacagcagcctgctccttccttacaaaatgttgctggcccaagcagaccatacattcctccaccaatccaacaacaacaacaaccncagaaac

SEQ ID NO: 14187 - DNA, 209 bp, Glycine max
  unsure at all n locations
aacagatgtgacatgaaccattgctgctatngtaagaaatatactaatagttatggtatccttatcgngtatgttgatgacatgttgatngcaggatctagtatgacagaaaataacaggttgaagcaacagttggcagaaaactttgaaatgaaggatcttggtccagctaaacanatccttggtatgagaattcttataaacagatc

SEQ ID NO: 14188 - DNA, 300 bp, Glycine max
  unsure at all n locations
ctctagcaagaggtttagtgaagatgtcagctagttgatgcccactatcaataaactcaatgcagcaatcaccctttgatatatgatctccaagacaatgatgtcttatctctatatngttggttctaaaatgaatgatnaggattttagatagattgatagcacttgtgttgtcacatttcaagggaatgtgatcaaggattacttcanagtcttcaagttgttgtntcatccagagactttgagcacaacaactnttagctgcagtgtattatgcttctgtagtggatagtgctacac

SEQ ID NO: 14189 - DNA, 229 bp, Glycine max
  unsure at all n locations
gtggttcatcattgccataccatacttgaacctaccttcattccaggaacttgtgagtcaagctgaggaagagtntggatatgatcattccatgggtggcctcacaattccttacagtgaagatgtttccaacatataactgatcacttgaatgtacaatacatctcgcactggtgcagacactgacttatttaatagacattttatacaatacgcatcttctcaacct

SEQ ID NO: 14190 - DNA, 256 bp, Glycine max
  unsure at all n locations
ggtgcgcggtagatgacgtatatctctgcacgtcacctgagttcagagtcagtgtgacaganattgtggggcggccgacanaagtgagtctcttgctcctacgtatcctcaatttgtgatgaggaactcanacttacgtagttcttgataactgtgagactaanatagtctcggtgttttttcactaaaatgcgaacatgcattagtaaagaaacaaaacttccaactgatcaaagcaacatatgcttttttttat

SEQ ID NO: 14191 - DNA, 183 bp, Glycine max
  unsure at all n locations
atgacactcacanttttcggattctgcacagtttgtgaaggcaatttgtcaaaatnttgngactgagctnggttcaactgagtagccatctgccccatctgattggtcagactctgaatgtangctcttgtctcttgctgaaatngcatattctggatggtcattngcctcactaactcttct

SEQ ID NO: 14192 - DNA, 246 bp, Glycine max
  unsure at all n locations
tctgcacctgtngcaagagtctgtggtctatgttcttctagagatcaccatacagatctctgtccttctttgcagcaatctggagtcaatgagcaatctgaagcttatgctgcanaaattataatagaccctctcaacagcaaaaccaacaacatcagaataattatgatctttcaagcaacagatacaatccaggttggaggaatcatncaaatctgagataggcaagtnctctacaacaacaac

SEQ ID NO: 14193 - DNA, 262 bp, Glycine max
gctgcagcactctaaggatcccgtaccgagctcgaatcgcctatagttgtctatacatttactggcgtcgttacaacgctgactggaaaacctgcgtacccactaatcgcttgcacacatccctttcccagctggcgaatagcgaaaggcccgcccatcgccttccacagttgccacctgatgggaatgggcctgatgcggatttctcttacctctggcggatttacaccgatatggtgcctctcagacaatctgtctgatg

SEQ ID NO: 14194 - DNA, 235 bp, Glycine max
  unsure at all n locations
acgggactctatcggacatccgagtaaaaagttattgtagtttgaatttgctcanggcttcagtattccatttcgagcgtctcgatatattacgggactcaatcggacatccgagtaaaaagttattgttgtttgaatatgctcagagcttccgcattccatttcgagcatctcgatttattactggactcaatcagacatcccagttaaaagttattgtggtttgaatttgctc

SEQ ID NO: 14195 - DNA, 356 bp, Glycine max
  unsure at all n locations
tcactcggaagtcctattgagtcccgaatatatcgatatgctcngaaattaaaaccgaagcccctagcaaattcgaacgacaataacttttcactcagaagtccaattgagtcccgcaatatatcgagacgctcgaaatttaaaaccgaagcttgtagcaaaatcgaacgacaataacaattcactcggaagtccgattgagtcccgtaatatatcgacatgctcgaaatttaaaaccgaagctcctagcaaattcgaacgacaataacttttcactcggaagtcccgatgagtcccgccatatatcgagacgctcgaaatttaaaaccgaagctcgtcgaanattaaaagacaat

SEQ ID NO: 14196 - DNA, 406 bp, Glycine max
atggcgtgagatatactgtgaggaaatggatgcatttggttatgaaaggaattacactcgcgcaagaaataatttgtgttcttctttcagtggcaaagcaaatccgttgattatactccccaaaatttctaatagctctgcaatcccattatgtttctcagtttcaaaaatgaactgataaaatatattggtgattgctttcctaatgaagggtcggtgcaccatatatttcccatatatacgatgaagaactggcttcaagtaatcccgctccctgcgatcttctgaatcacataggtctaatagtttgagaacaaatgaatgatcgacatatctttttgctaattttgcatcagtctcaggtgatgcgacaaaccttataaggagttcatatacaatttgaaag

SEQ ID NO: 14197 - DNA, 240 bp, Glycine max
  unsure at all n locations
agatgtgacatggaccattgcagctatgttaagaaatatactaatagttatgttatcctcgtcgtgtatgttgatgacatgttgattgcatgatctagtatggcagaaattaacaggtntgaacagttgttggcagaaaacttngaaatgaaggaatctggccagctaaacatatctttggtataagaattcttagaaatagatcagaaggaaatttgaagttgtgtcacgagaaatata

SEQ ID NO: 14198 - DNA, 469 bp, Glycine max
  unsure at all n locations
ttcacttatataataatatgatatgtaagataataaatgattttaatatgtatagagttaagaaattgaaattcaaaatttaaaattgtgttgacattaataatcaaatcaaatctgaatcaagtaattaatataaataataaaaaatcaaattatgtcataatgagagatataacaatgataaaaatttaaatttaaaattaaaaagtttaccatacattcataatcataaaatcaaatntgaattaagaattntaatataaaaatcaataaaaatgtgttctaatcaaaatttaaaatgtagtaatttattntagaactggtaatgaataatttaaatttttaaattgtatttaattatcagttaaatattgaatggtaattaattntgagagacttatatatnntattaaatatataatgtaaaanaatatggaatgattatatatatatatatatatatatatat

SEQ ID NO: 14199 - DNA, 419 bp, Glycine max
  unsure at all n locations
gtggactctaacatngttaataaaattactctgttggctgactaanaaanagatatttattattagagaaaggattatactttttttataattcgatatagaatgtaattnttatttattcaatcattaaattatatctatatactatcgagatcgtttgcatcanattttgttaaaattgaacgacaataaataggtaatcaaatgattcacatttagtatattttaaatttttttattacgtcgattttaatttatatgaacaaaatatcaaatgattctgcattgatataaaattntgcatgtgtaatctatgtgaaagagactttcaatccaacatcgaattntaatgaaacattatcccgttgaaagttatagatgggtgtaataattatcanagttactctagtgtaatttga

SEQ ID NO: 14200 - DNA, 379 bp, Glycine max
taaagtctcacgatcgtcacgtgctcatgcaacttttgttagtcgtggctatatgagacatcttgccgaacaaagtcaggttcacgataactcgcctgtgctctttcttccatgctatatgtagcaaagtgattgatccagtaatgtttgatgagttggaaaatgaggacgcaattatactgtgccagctggagatgtattttccccctgctttctttgacatcatgattcactcgattgtgcatctggtcagagaaatcaaatgttgtggtcctgtttatctactgtggatgtacctggttgagcgatacatgaagatcttaaaagggtatacaaagaatctatatcgtccgaaagcatctattgttgagaggtacat

SEQ ID NO: 14201 - DNA, 427 bp, Glycine max
  unsure at all n locations
ctacttcacatcgatttatttggtccctctagaactatgagtgtaggtggaaattactatggcttagtaatagtggatgattactcaaggttcactcggactnntgttttgagaaccaaaaaaagaagctcttgatgcttttcgcaaacttgccatggtgattcaaaatgaanaaggtctcaacattgcttcaattagaagtgatcatggaagtgaatttcanaatgattcttttgaaaacttttgtgaagaaaatggaatttaccacanattttatgccccaagaacacctcaatagaatggtgttgtggaaaggaaaaatagatcccttatagaaggtgcaagaacccttctaaatgaaacaaggttacctaagtacttttgggctgatggtgacatactaattgttacacctgatagagtaata

SEQ ID NO: 14202 - DNA, 283 bp, Glycine max
  unsure at all n locations
gttcacgataactcgcctgtgcttttacttccatgctatatgtagcaaagtgaatgatccagtaatgtttgatgagttggaaaatgaggccgcaattatactgtgccagttggagatgtattttccccctgctttctttgacatcatgattcactgaattgtgcatctggtcagagaaatcaaatgctgtggtcctgtttatctacggtggatgtacccggttgagcgatacatgaagatcttnaaagggtatacaaagaatctatatcatctggaagcatct

SEQ ID NO: 14203 - DNA, 466 bp, Glycine max
  unsure at all n locations
acatgtggcctcagatatcttaagaaggggggttgaattaagatattacaaactgtttccccaattaaaaattctactttgattctaatgcaagttccaagttcccttaaagatgaatttctaaatgatgattcaaattaaacaatctgaatgtaactgttaagcaacaataaataaaagagtttaagggaagagaaagtgtaaacacagtttttatacaggttcggcaaagtccgttgcctacgtccgatccccaagaaagccgcttgggagttccactatctcgtaatcctttacaccttctgaaacacacaaggacatcccttcctttgtgttcagatgctttacaacaagagactctcagtctcttagcccttngatcagaaagagaggaagaaagaaatgatcttcttgaagagacagatgttacaatgaagtgctcaattccttattgaatgtcacaagt

SEQ ID NO: 14204 - DNA, 437 bp, Glycine max
tctgtaatcgattatatgctatctattcttgtgtaatcgattatcagaacactaaatagggcttttcctcaacaaaatatctatgtctatgctaaaaacatctaactatagcagtcatcaatactgatactcatttaattcaatcaaacaagaatcaatcacacaataacacaccaatcaaacacaattaaaatcttataatcaaatacaatcaatcaatcattaaccataaatatttcaatcaaccaatcaatccttatttatccaaatcactaatatctaagaggcctaattctcttctaatggaaaagaatgtttctttggtgagagggtttgtgaagatatcaacaagttgattctttgtatcaacaaattctagcacataatctcccttcagaacatgatctcttagaaaatggtgtctaatttctatatgc

SEQ ID NO: 14205 - DNA, 377 bp, Glycine max
  unsure at all n locations
cacaacagtgagtgcagctataaatgcagctccaaagagtagtagtggaaggtatgtgatatatgtgaagggtggcgtgtacgatgaacaagttgaggtgaaagcaaagaatataatgttggttggagatggtattggaaagactataatcacaggtagcataagtgttggaggaggcaccacaaccttccgttcagccactggttggtaagcttttattattttttattattgttaattaattctaatcatttcttaagtcttatgtttgactgtgttacataanaataatttaaagaaaattaccaacaattatttaaattgtctataagaatcagaattcatgataaaattgtaaaaaaatgattatggtatta

SEQ ID NO: 14206 - DNA, 406 bp, Glycine max
  unsure at all n locations
attgtcgttcatgcatcctcatccattgagtacggtgccccatgaattgattgcctagcgctgttcatgcatcctccatcatcaaatcttattcggagccccatgaattgattgtcgttcatgcatcctccaccattcagttcagagccttacgaattgactgccaagctctgttcatgaatcctctatcatcaaatcttattcgaagccccatgaattgattgccattcatgcaacctccaccattgagtccggagccncacgaattgattgcctagtgatgttcgtgcatcctgcaccatcttattcggagccccatgaattgattgtcgttcatgcatcctccaccattgagtccggagccttacgaattgactgccaagctcttttcatgcctnctctatca

SEQ ID NO: 14207 - DNA, 466 bp, Glycine max
  unsure at all n locations
atcctgatgaggatgttccatatgttctcatgactggactaatacattngctgtccaagtttcatggtcttgcaggtgaagatcctcataagcatcttaaggagttccatattgtctgtcccaccatgaaaccccctgatgtccaggaagatcatatctttctaaaagcttttcctcattctctggagggagtggcgaaagaatggttgtactaccttgctcccaggtccattaccagctgggatgaccttaagagggtgttcttggagaaattcttccctgcatctaggaccactgccattagaaaagacattttaggcattaggcaacttagtggagaaagcttgtatgagtactgggaaagattcaagaaaatgtgttgcagttgtccttaccaccagattntttagcaactccttctgcaatatttctatgagggacttagcaacattggagaagagtatga

SEQ ID NO: 14208 - DNA, 394 bp, Glycine max
  unsure at all n locations
agaagatgctatctgagcttacatgtcaattcttacgtaacattaattaagggtttaatacacgaataaaaaaagagaaatactatgtacaatcaataatttctttttgaaagagtgctggtgtaatttattattttattaaatctcctatctttttcagtaaatagacacatattacattntatccataatttttttagaacttacttaatatgtattactttaacatatcacaagagataaaatcttacataaatatatgtatataaattatagagataaatggttataaaaagttataataatataacttacagaacatactttattataatgaatataatatggtgctatttaagtcttctttaagaattatatgacgaaatttataaca

SEQ ID NO: 14209 - DNA, 395 bp, Glycine max
  unsure at all n locations
tatggtccctttcaggacttagaatgctttggcaaagtggcctatcacctgcaattacctgaagaagcttgagtccactctattttccactgctccttgcttaaaccattcagaggttccctggaatagtcggaaatggctccattaccacaacaattcatcaattatcaacccttagtttctcctctggctatcctcaattatcgtcgggtacctggtacacctaatgctccatgggaggtgttagtccaatggcagggtctgtctccagatgagacctcttgngaagatnggtcccaactatgccanaaatatcaccttgaggacaaggtgatcttantagggctggggaatgatatgataccagaagcagataacatagcattcgaaataga

SEQ ID NO: 14210 - DNA, 439 bp, Glycine max
  unsure at all n locations
atgccgtaccaagaccttggagcctactttaagccatacaaggactntntcaaccgatatactttctcttcctgtccacgaactacaaatccttcaggctgctctacaaaaatttcttcttccaagtgtccattcaagaaggttgatttaacatccatgtgatgtataatccaacctttatgtgcagcaagagctaacaacagccttatggtatccaacctggcaactggaaaaaaagtttttgagaagtctaccccgaacatatgcacatatcccttcacaacaagccttgccttatgtttgtttatagaaccatcaacattaagctntgttctataaacccatttcactccaatgacattnttatctntaggtttctccgtgagctcccatgtttgatgtttntcaatcatatcaagctcctccttcattgcactta

SEQ ID NO: 14211 - DNA, 349 bp, Glycine max
  unsure at all n locations
gctatgctgtanacatntataatagaactcttcagtctcaaaaccaacaacaacagaataattatgatccttcaagcaatagatacaatccatgttagaggaatcatccaaaactgagatggacaagtcctacacaacaacaatagtctatccctcctttctagaatgttgctggtccaagcaagacatatgttcctcctccaatgcagcaacagtagcaacagtcacaacaaagacaaccatcaattgaggctcctcctcaaccttccttagaagagttagtgaggcaaatgaccatccaaaatatgcaatntcaacaagagacaagagcttccatttagagtctgac

SEQ ID NO: 14212 - DNA, 347 bp, Glycine max
  unsure at all n locations
tcataactcagctggccatatatcagaaattctgctgatcaccatacagatctctgtccttctttgcagctatctggagtcaatgagcaacttgaagcccatgctgcatacatttataatagactccctcagcaacaaaaccaacaacaacagaataattatgatctttcaaacaatagatacaatccaggttggaggaatcatccaaatctgagatgggaaaatcctccacaacaacaacagcagcaacaacaacagtctgtcccttccttccagaatgggtgtggtcccaagcaggccatatgtcctnnctcaatgcagcagcaatagcaacaacaaagacaaca

SEQ ID NO: 14213 - DNA, 321 bp, Glycine max
gaaccttcacccgacgaagacactgacaacaacttatcttctccttcttggacaaagcatggctggcgtgagggcaatgtatatcatattgccatcacaccgtggatgcaactgtgatcatatacccacatcaactagatcttgacgagtattcacgccatccttcgttttgccttgaatgttaaggatcgtcccaatcacactatcacaaacatttttctccacatgcataacatcaatacaatgtctaacgtcaagatcacaccagttcggatgatcagagaaaatggacctcttcttctatatgcaacatctgacttt

SEQ ID NO: 14214 - DNA, 445 bp, Glycine max
  unsure at all n locations
gcttccatcacttttgctcctacgtatcctcattntgtgatgaggaactcagacctacgtagttcttgataactgtgagactaaaaatagtctcggtgttttcttcaccaaaatgtgaacatgctttagtaaagagacaaaacttccaactgatcagagcaacatatgctttttggatgaaaaacaatgtgtctattggggaaggagagtatgctaatgaaattntctcataaccgtaaatgagattttggatgttagcatttcgtttctaaatgatccatttgaggaagcactgngttcaacaaaaatagaagataatcactcaaagtgtatcaatctcacacatgtatatgttttatcctaattccgaaccatagatatgtcatgacttgattntgcanatcatttnctatcaaatcaaagaatacatgcatgatcatggatc

SEQ ID NO: 14215 - DNA, 381 bp, Glycine max
  unsure at all n locations
gcagctgcagttttaatatttacttaattactctcaatnntagntnctctacttataattattcgcattntatcttcacataatttttaaattatntaaactaaatcactntaagttntattcaaaaactaatagaaatgtagtgaaggtatggcattattaacttatagtaatatatataaatgaacaaaaaatgtataatatgtaatgaattttttataattttatttaaatatttgtgcggacctatacaaatttataatatatcacacctctgttatattattattctttntatttggatttgaatntaaacaacaaactatntgtgttctttatcataaacatctattntttataagtaacatgctcaaatggaaa

SEQ ID NO: 14216 - DNA, 234 bp, Glycine max
  unsure at all n locations
gaaagtccgattcagctgcataatatatcaagacactcganattgaatgccggaagatgatgagaaatttanattggtcataacttatcacacagatgtctgattctgcccataatatatcgagatgctcgaaattaaccatggagctctcgagaaatcaaatggtcatacctttcaattggatgcccgatccatgcgcatctttatcgagactctcgaaattgacaacgaagc

SEQ ID NO: 14217 - DNA, 281 bp, Glycine max
  unsure at all n locations
cggatgcctgantgagtcccgagatataacgagacactcgaaattgaatgttgaacctctgagcanattcaaacgacaataactctcttctcagatgtttgagtgagactcgtaatatatcgagacgctcgaaattgaatgtttaagctttgagctaattcanacgacaataactttttactcggatgtctgattgaggcccgaaaatatcgagacgctcgaaattgaatgttgaagctctgagccaattcaaacgacaatatctttttactcggatgtct

SEQ ID NO: 14218 - DNA, 318 bp, Glycine max
  unsure at all n locations
ttaagtcacctgctgctgcagctatatgcatagaaatattatcatatattgttcacaanaaagacattaaaataatgctcttaagacaattatcaatgagaatatattctcaatatatcactcatattataattagatattgtatttaagtcttatcataaatataccacttaaatttatcaatgttgattgattaatttaatttatagtaccatcagattaatcaataaatatatcaaatttaagaacgattccatgagaagaagctcgtgtccaatggatctagctcagttgataatacacactatgtgctgagtt

SEQ ID NO: 14219 - DNA, 347 bp, Glycine max
  unsure at all n locations
agcttgttgnggccaaaaatgaccagcctctcctattagcctcactgctgagaccctctttgctacatctcagattctcaaaaacctcctcaatgggaatgttctcctgcattaaaaaaaaaaaaaaaccatcattgaaaccacaaaaggcacagcaaggaagaggcttatagagtggttcagatctgttaccaaaatctacagtttctttcaacacagcctccaatacttgagacttgtcacccatgctggaccacttcctctacctctctctcccaactgtgtttactaaaacaaatataataaaaacagctatgatattaacacaatgcgtgcacaccacatac

SEQ ID NO: 14220 - DNA, 375 bp, Glycine max
  unsure at all n locations
agcttgtcanaaaggaagcaagttaaatactcctttcaaagataaaacgttgtttccacttcaaaactccttgaactacttcacatatttatttggtccctcaagaactatgagtttaggtggaaattactatggcttattaatagtagatgattactcaaggttcacttggactttgtttttgaaaaccaaaaatgaagcttttgatgcttttcacanacttgtcaaggtgattcaaaataaaaaaaggttttaacattgtttcaattagaagtgatcatggagatgaatttcaaaataagtctttgaaaaacttttgtgaagaaaatggaattcatcacatnttttctgccccaagaacaccttagtagaatg

SEQ ID NO: 14221 - DNA, 349 bp, Glycine max
  unsure at all n locations
agcttagtanagctaggcactaacaggaagtgttgttgatataccaattaanactaaacccaaccaaatacacctttggtgtgaagtccgagaagctgttatgatttatcgtaagtcagaaagggatagagatagatcccgagatagtgaacgccatccttganatgccggaaccacgcacggagaagcatagtcgggggtttctgggcacgctgaattatatcgcgagatttatctcgcaactcacctctacctgtgagccgcattttaagctattacgtaagaaccaggcggtcctgtggaacagttactgcatagaggccttctagaagatcaaacagagtctcac

SEQ ID NO: 14222 - DNA, 174 bp, Glycine max
gcttatgacaattagaaattctcgttatcttccgatgaattaatttgatcggctcgatatattataagtctgaatcggacctacgtgtgaaaagttatgaccatttgaattttttgagagattcctgtgtttgagatttcgagcgtctagatatattatgcgcctgaatttgac

SEQ ID NO: 14223 - DNA, 359 bp, Glycine max
  unsure at all n locations
agcttgtatcttcatgccagatactttcctttatctttcttttnaatagtggattgtgcagaacaaggcaaaaaaaagaaaagtagcgctaaactttcgcttttaataaatatttttaatttaataaaattttcaaatacaaagtgacaaattatcatacatttaatcctgcaatattctatgtctctttaataaatggttttatatataattctgctcatatagaaataaagaaaccgttctttaatttattcattccatttcaaaattatactctcaatctaaactgtggagagataatattaatattctatttttatattattttcttgacaatctcaattactaattaaatttat

SEQ ID NO: 14224 - DNA, 306 bp, Glycine max
  unsure at all n locations
gctagacttgttgctaatgaatttactcagaaagatgacattgattataaagagacattttactggtctcacganaggattctttcatgattatcatgacattagtagcccattatgacttggagctacatcaaatagatgtgaaaaccacctttctgaatggagatttagaggagaatggttgtatggaccaaccaatgggggttctcagttgaaggaaatgaacacatggtgtgcatactaaagaaatcaatatacagtcttaaagcaagcttccccgcaatggtatttgaggtttaatgatac

SEQ ID NO: 14225 - DNA, 316 bp, Glycine max
  unsure at all n locations
agcttgaatgctctattcaatggagttgacatgtatatcttcagactgatcaacacttgcacagtggccaaagatgcatgggagatcctgataaccactcatgaaggaacctccaaagtgaagatgtccagattgcaactgttggctacaaaattcgaatatctgaagatgaaggaggaagaatgtattcatgacttccacatgaacattcttgaaattgccaatgcttgcactgccttgngagagaagatgacagatgaaaagctggtgagaaagatcctcagatccttgcctaagagatttgacatgaaagtca

SEQ ID NO: 14226 - DNA, 330 bp, Glycine max
tagtgctacaatatcaagatgaagaagttgcttgataaataataaataaagaattacactatgcaactactatttctctaacaccagtgatcttttataacttttagttaaattgaagtctggaggtaaagtcaatattacctacgaacaaataactaaaaatatgtatctttgctaaatataatcatgtttgatttgaaacaattaatttcgatgtttttatcaaattaaacacgcactaaataattaaattaacattaaagaaaaggattatttatatgcctcataaataaacacgcactaaataactaaatacaatattatttatat

SEQ ID NO: 14227 - DNA, 362 bp, Glycine max
agcttctttcaacgaacgcgactggtaatgtttatattatcctataagcaacgtatgtatttggaaaagaacctaacctttttatatagctcaactattttaatggtgtgttaatttcatttgttagaacttctttcaataactctaattctgaaaacaaatcatgacaatcaatattataacggtcctcataactcaaaatcttgtcaagattgatgcaatatattgttcaattcattttcactcagagttctaaatctatttgaatcaaataaaaagtcaaacatcgtttcatattctataaattgttcaaatcgactctcaatagaagaaatatactattctaatacataccataaata

SEQ ID NO: 14228 - DNA, 329 bp, Glycine max
  unsure at all n locations
gtcacctgcngcatgcaagcttatgctgcaanatatacaatagacctcctcttcctcagtagcaaaatcaaccacagcagaacaattatgacctcttcagcaacagatacaaccctggatagaggaatcaccctaacctcaaatggtccagccctcagcaacaacaacagcagcctgctccttccttacaaaatgctgctggcccaagcagaccatacatttcttcaccaatccaacaacagcaacaacctcagaaacagccaacagttgaggcccctccacaaccttccctcgaagaacttgtgaggcagatgactatgcagatcatg

SEQ ID NO: 14229 - DNA, 334 bp, Glycine max
  unsure at all n locations
atctctaagcacctgcngctgcagctatgctganatattacaatagacccnctcaatctcagtagcaaaatcaaccacagcagaacaattatgacctctccagcaacagatacaaccctggatagaggaatcaccctaacctcagatggtccagccctcagcaacaacaacagcagcctgctccttccttccaaaatgctgctggcccaagcagaaccatatcattcctcaccaatccaacaacagcaacaaccccagaaacagccaacagttgaggcccctccacaaccttccctcgaagaacttgtgaggcanatgactatgcagaacatgc

SEQ ID NO: 14230 - DNA, 345 bp, Glycine max
  unsure at all n locations
agcttcacagcanatgatagaatgtctatatttttatcatttgacaatttattggtattatatgacttatccttcatatatatagactctcttttttcatctttatcaactgtcgaattttacataattcataaattttatttgataccttgcatagcattgcatttagcaaatacagattaacatgcttggtttataagtattgacacaaaacaggcttattgaaataccttgtattgcatgttgctagggcttattaaaaatatcaaattattttacatgtgtctgtgatatcacacttattaatgatgcgataaattatgtaactatcatgtctctcgttga

SEQ ID NO: 14231 - DNA, 148 bp, Glycine max
  unsure at all n locations
tgctacttatatgacgntgattccctatataaacaagaattatgactatggtctaaatatatggctattgactttctacctgattgctgcgatgagctaccgggctgaacatgtcttgaatattgctcatgatcgcgtatacaccatt

SEQ ID NO: 14232 - DNA, 499 bp, Glycine max
  unsure at all n locations
tgtcggtggtaccgatgtccatatatgttatggtattttctccttctgnnttgnttagtaatagtatacattatgtgcctgatttcttttccttcatttgatgataaaggaacaattaatgtgttatcatggcagggtccattttgctcgtctctctaaaaagtgttcacaggaaatgcttaattataatattggtcaatgggtattaataatatctaataaatactgataaaaaaagtatctaataaatttttaaatatattaaaagataaacaacaaattttatattttaataaatacattctattaatgtattcgttttgttaactaacactctaaagaaaatggtcataatactctcttgaaaaaatatattatgtttattgcattaatatatatcaactcatgtatttttttcatagtagtataaagggaaacaaataagagtaaatcatactttcttctcctaataaatacaagtattcaatgtaacatcatg

SEQ ID NO: 14233 - DNA, 423 bp, Glycine max
  unsure at all n locations
atcaattgaggaagcctcgacaagttccccattgaaaaatgaaattctgataccaatgccagatgtcgtacaggatgtcacgacatcacgcttcagaacatgcagattatctctgagtgaatgaacagattaaacaagtaaataacacaagagaattgttaacccagttcggtgcaacctcacctacatctgggggctaccaagccagggaggaaatccactaaaatagtgtgagttcagggtctaacagccactgtttacaaccttctcacctaaccactacccgtgcgacctctacctaagagccactcttagatatgagaacccctctcactccctctcagacactctcccgtgtntacaattaaatcaaggacactccagagatggctctctgaacaaaagagatcaactctacacact

SEQ ID NO: 14234 - DNA, 499 bp, Glycine max
  unsure at all n locations
ctgatggtgtcgagaagaaatcacatgtntgtcatcaacatatagggggagaatgtgaatgtatgtatacatgattttgatgatgtcaaaaaaagaatcaaataaggctcattttgcttcaagattaatacaagattgtttcaacaaacaaagccttgattcaagatttcttcaagatcaagccttgcctcaaaatgtagagatttcaagtcatccaaggcacatgtaatcgattaccaatacatgcaatcgattaccaaggcacatgaaagtgtgtaatcgattacacatcatatgtaatcgattaccagagactctgaatgttgggaattcaaattttaaatgaagagtcacaactgttcaagaaaaacaactgtgtaatcgattacactaattntgtaatcgattactagagagggatttcaaggaatatcgccaacagtcacatcttatcatttggattttgaatggccatcanaggcctatatatatgtgtgac

SEQ ID NO: 14235 - DNA, 361 bp, Glycine max
  unsure at all n locations
agcttgtannggttaaagtctcatgatttgtttcgttctcgtgcaacaattggtagccgcgactatacgagacatcttgccaaacaaagtcaggttagccataactcgcttgtgctttttcttccttgctatatgtagcaaagtcattaatccagtcaagtttgatgagttggaaaatgaggccgcaaatatactgtgccagttggagatgtattttccccctactttctttgacatcatgattcacttgattgtgtatctggtcagagaaatcaaatgttgtggtcctgtttatctacgggggatgtacctggttgagtgatacatgaagatcttaataggtatacaaagaatctatatt

SEQ ID NO: 14236 - DNA, 496 bp, Glycine max
  unsure at all n locations
ccaagctnntgggtccacatgatgaacatctctactacacaccatangnttattcatnggattatacagtgtgtatgaaccaatggggttgtagccaataaagatcattacttcactcttgttgtctagcttcttccttttctgatcaggaatatgtttatagcataaagagccaaataccttaaagtgtttgatagaaggtttcaatccataccaggcttcttcaggtgccatcgaatctagcttcttagtaggacacctatttagcaaatagacagcaatagtagcagcttcaccccaaaaactgtgtggtagattctttgttttcaacatacttctcaccatattaagtatagttctgtttcttctctcaacaaccncattatgttggggtgtataaggtgcagtgacgtcatgcatgataccttgatcgttacagtacatgtcacactcacttgagttgaattctccacctgcatctcgtttgaggatcttc

SEQ ID NO: 14237 - DNA, 433 bp, Glycine max
  unsure at all n locations
cttgggcaaattcaaacgaacaataacttttactcggatgtctgattgagtcccgtaatatatcgacacgctcgaaattgaatgtcgaagctctgaggaaattcaaacgacaataaatatttactcggatgtctgatagagtcccgtaacatatcgaggcgctcgaaattgaatgttgaagctctgagccaattcaaacgacaataactttttacacggatgtctgattgagtcccgtcatatatcgagacgctcgaaattgaatgttgaagctctgagccaattcaaacgacaataactttttactcggatgtctgagtgagtcccgtaatatatcgagacgctcgaaattgaatgttgaagctctgagccaattcaaacgacaataactttttactcggatgtctgattgagtctngtnatatatcgagac

SEQ ID NO: 14238 - DNA, 252 bp, Glycine max
agcttcaacattcaacttcgagcgtcacgttatattatatgactcaattagacatccgagtaaaaagttattgtcggttgaatttgctcaaagcttcaacattcaatttagagcgtctcgatatatgacgggactcaatcagacatccgagtaaaaagatattgtccgcttaaatggctcagagcttctacattcaatttcgagcgtctcgatatatgacgggactcaatcaggcattcgagtaaaaagtta

SEQ ID NO: 14239 - DNA, 402 bp, Glycine max
  unsure at all n locations
agcttgttgagaaattgtacaaacaagagtgtatttgataaggcatgctattactagaattgccacttcttatctaaccttagaaaggctccacaaagagaaaactaatattggaaagatgtttattttttatgaatggatcttaaacaagttatctaaggagcttaaggggaaagaagctgtaaaggtagtgctcatgccttctttntggaatagtgtggtttacactcttaaagtcatgggtccacttgtcaaagtgcttcgtcttgtggatgatgaaaggaaaccatccatgggttatatctatgaagcaatggacaaagcaaaagaaataattaacaagtctttcaacaaccacgaaagcaagtacaaagatgtgtttgcaatcattgattaaagatg

SEQ ID NO: 14240 - DNA, 484 bp, Glycine max
  unsure at all n locations
taagctctntcaactgcacaaggctcttaatatttgaagtttatccttgtggaaccttcacccgacgaagacactgacaaaaacttatcttctccttcttggacaaagtatggcaggctgggggcaagtaaattttcttcccatcaggccttggatgcaactgtgatcgtatacccatataagctagatcttgatgggtattcaagccatccttcgtcttgccttgaatgttaaggagcatcccaatcacactgtcacaaacatttttctccacatgcataacatcaatacaatgtttaacatcaagatcacaccagtacggaatatcaaagaaaatggacctcttcttccatatgcaactctgactnttatccttcttttgggtctttccaaatacagtattcaggtgttgaacccgctgataaacctgctcaccagtcaatggtatcggcacaatatcatgctcttgacttccattaaaagc

SEQ ID NO: 14241 - DNA, 408 bp, Glycine max
catccttagtgagcaagtcgctcaatggtctggctatcttggagaagaccttgatgaatcttctatagaaacctgcgtgtccaagaaaacttctgatacccttggcatttactggtggtggtaacttcttaataacatcaattattgctttatgaatcttgatgccttgagctataattttgacgcccaagactatcgcttcttcaaccatgaagtgacacttctcccaattcagcatcatactggtcttaacatatctatatagtaccagctctagattcgtcaagcagtaatcaaaggaaggcccgaacactgagaagtcatgcatgaagacttctatgcatttctctaccatgtcagcgaagatggctagcatgcacctctggaaagtggcaggtgtgttcataa

SEQ ID NO: 14242 - DNA, 427 bp, Glycine max
  unsure at all n locations
tctggtgggacatctngacttgctntccaatctgacattttccacttattctgccttcttctattttcagattgggaatgcctctaacagcacctntgtcaatgattttcttcatgcctcttaagtgcagatgtccaaatttatgatgccatattctgacttcatcttctctggagaatagacatgtggaggagtaactggtctcttgaggtgtccataggtaacagttgtcctttgatctgctgcccttcattaggacttcactcttctcatttgtcaccaagcattctgactttgtgaagttacattgtatccttcatcacacagctgactgatgctgatcaagtttgcagtcagttccttcaccagcagtactttgttcagactaggaagtccatcatggactatctatcccattcattgattt

SEQ ID NO: 14243 - DNA, 394 bp, Glycine max
  unsure at all n locations
tacatgtgctatagtctcgagattatnttctgtcatgattatgtcgncaacataaacaagaatagctgttatatcattatcattatcagaatataataaaagcgagtgatcaactgaggattgacgaaatccctgtgagagaagaaatgacgaaagccgtgtgaaccatgggcgactggcttgtttgagcccatataaggaacgctgaatgcgacaaacaaagttgggattatccacaacaagtcctggagggagcttcatataaacctcttcattaagatccccatgaaggaaagcatggtttacatccagttgtcgaatgtgccagttatgaagagcatcaagggcaatgagtaaccggactagtggtagcttggccacaggggagaatgta

SEQ ID NO: 14244 - DNA, 456 bp, Glycine max
  unsure at all n locations
agcttagatggagaagaagacagcgagattgttattacagcgtgaaggagacgaaacatacctaggtatggtggcgaaggagaagaaccacagagttgtcacgatgctcgagtgcgacgaaaacgatgctcgagcttagacaaaacgattctcagatgaagaacagacaacttcaaggtaaatggacaacaaagagagcaagaaagcttagatggcgaagaagacagcgagaaggagaagacagcgtgaaggagacgaaacatacctaggtatggtggcgaaggagaagaagtagagacttatgacgatgctcgagtgcgacgaacacgatgctcagatgcagaacatagaccttcaaggtagacggagattataagaagaagaagagagcgcgaaagcttatatggagaagaagacagcgcgagcttcatagggctcancgatattttaaaatat

SEQ ID NO: 14245 - DNA, 371 bp, Glycine max
agcttagctaactctataggagacattctatttgagctatggatatggggccagtaccacgtactaagtctatggaaaactctatctctctctcacgtggcagatcagatatatcctcaggaaacacttcaagaaactctctaacaacagggaggtcacacatagaaacctttgtctctacttctaggctagacaagatcatgtacacttgagcatcttcctttaaagatgtcacaacttggttggcagagataaacatcatatccttactcactctagaatcatcaaacaccacactcttatcaaaacagttcaacaagacatgggtggaagataaccagtccataccaagaataacatcaatctgactc

SEQ ID NO: 14246 - DNA, 439 bp, Glycine max
  unsure at all n locations
agaaacatataaaccaatatacgtatctgcaaaattatcctcaagatgtgatcgctcattatcaattgttcgaccgtaattaaaattaacatgaatagacttatccattactaaagttcttgggttaaacaatctataagctttagatgtgtcagaataccctaagaagatccctttatccaccattgaatcaaactttgtgagtacatctatagtgctaacgatgaaacacttacatccaaatggatgaaagtatgaaataatgtgtcttcttgctttgcatagttcataaggagtcatttttatcatcggtcttatcaatattcagtgttgaacaaagcaagttgtgaaaagaatgtgcctagccttttcttgcnagttctattttactttaactaccctatttcttgaggggtctcgctaagacaagtatgaaaat

SEQ ID NO: 14247 - DNA, 447 bp, Glycine max
  unsure at all n locations
ggaccttgaaactcagctgccantaaaaggcatngttatatcatattgctgattatcccaatgaaaggaagtggataaagttagaatagttctgattgttataggtttcacaactggggaaaatgtttctttgaaatcaaaaccaggctgttgatggaagccttttggtacaagacgtgccttgtacttactgacggacccatctgaattatgcttgactctaaaaacccacttgcaaccaattggtttcctattaggaggtttaggaaccaattcccatgtattgttttgagtagtgcaaccattttttcatccatagcatctttccacttaggatctttaagtgttgttttgacagctttatgaacaacatgagttagaagcaagggtggttggagtctaggcttgacaattccattttttgatctcagtgtcatatgatgaatg

SEQ ID NO: 14248 - DNA, 447 bp, Glycine max
  unsure at all n locations
agcaatatctctaagggctaccgtgtcaacaactagcaaactaagaaactcgtcattagtcgagatgttggagntgatgagtacgcttcttggaattgggataaagaanaagtggagaaaaacgttcttatacctgctcaactacctcaagaagaaactgaggaagaagacccaggtgaaccaccttcaccttcacctccaccacaacaacaagatcaagaactatcatcaccagagtctactccaagacgagtaagatctttggtggacatatattaaacttgtaattnggccatacttgaacctaatagcattgaagaagcgtcaaagcacgaagtatgggtcaaggcaatggaagaagagatacaaatgatcgagaaaaacaacatatgggagttagtatatcgtccccctggaaaagatatcattggcgttaagtgggtctat

SEQ ID NO: 14249 - DNA, 437 bp, Glycine max
  unsure at all n locations
gaaaagatggcctcatcaaattccttatttccagtangtaattctatcaatagacctccaatctttaatggagagggttaccactactggaaaacccgaatgcaaatttttatcgaggcaatagatctaaatatctgggaagccattgaaatagggccttatatacccaccacagtagaaagagtttcaatagatggtagttcaccaagtgaaagcataaccatagaaaaacctagagatagatggtctgaagaggatagaaaacgagtacaatacaacctaaaagccaaaaacataataacatctgccctaggaatggatgaatatttcagagtttcaaattgcaagagtgctaaggaaatgtgggacactcttcgataacacatgaaggaactacagatgttaaaagatctanggataatgcactaactcatgag

SEQ ID NO: 14250 - DNA, 395 bp, Glycine max
  unsure at all n locations
gcttgatatgtctaaagcctatgtctttgttttatangtgtttctggagagaattcttagctctatgggattntcaagtcattgggttgattttattatgaactatgcgcagactgtttcttttgcagctatggtgaatggttctccccatagagttttcacaccaaaagggctctcaggcaaggggatcccttatcactatatttattcattttatatgttgaagccctatcagctatggtgactagatcggtggagcaaggagcattacatgggattagtgtccccttcagcccttatgataactcatttattttttgtagatggcattatcattntttgcacagcaaccactgaagaagcaagccatttatctacaattnccaagctctatg

SEQ ID NO: 14251 - DNA, 483 bp, Glycine max
tagggtatcatcggatccgggttgtttctgaagacaccttcagtctaacttttggacttgtaatgggcactatggatttttggtgatgccttttgggctcactaatgcatcttctacctttcagtctgccatgaatattctccacccatttctaaggaaatatgtcctagttttttttttatgatatccttatttccagtaaaataatgactgaccgtttaactcacttacacctggtttttcagttagttgttgctaaccagttttatgccaaattcaataattgtgctcttgcgttgattcggttcaatatttgggcaatgttattactgctaaaggtgtatcctcagatttggataaaattacagccatcttactttggccggagccatgttctttacaacataaggggcttttctaaacatttaataagaaattctgagtctctggccgctcctctcatcgatttcttatgttccacta

SEQ ID NO: 14252 - DNA, 401 bp, Glycine max
taacttggttacccatctggccatgaattaaaaatgtgcacctgtcgccagactctgtgctttatgctcctctgccaaccaccacacagacctttgcccttctatgcagcaacttggagcaattgaatagcctgaagcttatgctgcaaacatctacaatagacctccgcaacctcagcaacaaaatcaaccacaacagaacaattatgacctctccagcaacaggtacaatcccgggtggaggaatcatcccaaccttagatggtcgagtccttcacaacagcaaccacaacaacaacagccttattttcagaatgtttctggcctaagtagaccatatgttcctccaccaatccaacagcaacaacaacagcagcagcaacaacaacaacccaaaaaca

SEQ ID NO: 14253 - DNA, 417 bp, Glycine max
  unsure at all n locations
ttggtgacaactttattttcatccaaatgtnttttttgcatcagaaggttttaaacgggaaaaaaattaattttcatgagaaataacttttgaaaaaatatatgatgtacaactaacctcgttgaatattgtccaaaaattttcccaaattatttataaagtgatatgataatatttagaaattttgatgttaaaatacggttgtaggacaacaaagatacaataactatgaaaaatagattcttgtaatttgtttggcttgagaaaaatatgacatattattaaggttaaggaaattccctattaaagtttataaaattcagaggtgtgtaagtactttttctaaattaaaaatagcgtttaagaataatttcagtgttaacagttaaattggaagaaaagtttctataatgagtt

SEQ ID NO: 14254 - DNA, 387 bp, Glycine max
  unsure at all n locations
gcttgcataccccaaggatccattaggaaatcacttgtgaattagagccatgtgggtgggcttatgggccactttgggatagacaagacccttgtcttactcaaagaaaagttttattggccccatatgaagaaagatgtccataagcattgcactatgtgtgtggcttgtttacaagccaagtctaaggtgatgcctcatgngctatacacacccttacccatcccatctgcaccttgggtagacattagtatggactttgtccttgggcttcctagaacccaaagaggtgtagactctgtctttgtggtggtagataggtttagcaagatggcacactttataccatgccacaaggtggatgatgcttcctacatctcaaaactc

SEQ ID NO: 14255 - DNA, 446 bp, Glycine max
  unsure at all n locations
agctnggttacctcattcttcactacttatataatcaccgggttgagtcttctctgtggctgtcttattggtttagccccatcctctaaatttattcgatgcatacatgtggacgggctaataccaggattgcccgccaaggtccagcctatagccttcttatgcttcttgagaactgataacagcttcttctcttgctcatcagcaagggaggcatatataattattggaaaacttttgttatcatccaagtaagcatattttaaatttgatggcagaggcttcagttttggtgtgggcggctggataatggtagaaagagatggtttcttagcctgtacctcataaagaaagtaagaggtatgtgtacttcctgaaacatgtgtagttctatctgactctagaaaatcaatctcaagagggaaaacatcaccagacatgtaatc

SEQ ID NO: 14256 - DNA, 498 bp, Glycine max
  unsure at all n locations
ntagcttcttaaggaagttntctcaaagaagcttctcatggaagttttcttaagaaagcttctcaaggaagttacctagtctataaataaaagcatgtgtaacacttgttataactttgatgaatgagagtcttgtaagacacaactcaaagttcaacttctctccctttttcttccttcaatttcgtgctcccttctctcntttctttagcaaatgctcacccccccctctaaaatttaattggattgggcttctcccaattcaattaaatttattttcaaccacacacatcaaatattcacttaatgcatgccaaattagaaaactacccctaatacaaaaaactagtctaggtgccctaaaatacaagagatgaaaaatcttacatttctagggtaccttaactatattgtggagccctaaatacaaggcccaaaaataatgaaaccttaatctaatatgtacaaagataagcgggctcatacttagcctatggg

SEQ ID NO: 14257 - DNA, 253 bp, Glycine max
  unsure at all n locations
ctataatacacgcccgaagtaaatcctctagagcctgaatggttcgttcagtctgaccatctatttgaggatgataagctgaactaagctttagctttgtccccaaggcttcatgtagacttgtccaaaatcgcgaagtgaacctcggatccctgtccgatacaatacttgaaggaantnncatgcaccttacttactctttgatatacaactgtactaacttatccattctatacttcatattcaccggaat

SEQ ID NO: 14258 - DNA, 207 bp, Glycine max
tcggacatccgagttaaaagttattgtcgtgtaacttttcctagagcttccgttttcaatttcgagcgtctagatatatgataaggctcaatcgaacattcgagttaaaagttattggtcgttgacttttctgagagcttccgctttcaatttcgagcgtctcgatgtattatagggctcaatcggacattcgagctaaaagatatt

SEQ ID NO: 14259 - DNA, 161 bp, Glycine max
atcgagacactcgtaattgaaacggaagctctgatgaaaatctaaagacaataacttttaactcgggtgtctgatcgagcccttgaatatatcaagacactcgtaattgaaaacagaagttctgagcatattcaaacgacaataacttttgatactgatgt

SEQ ID NO: 14260 - DNA, 315 bp, Glycine max
  unsure at all n locations
cacaccatgtttgatgattcaccctgagcaacaaaacttggcggttgctccatataaacctctntctcaatatcgccatgtaggaaagctattcttttgtcaagctagaagagacgccaatgacagatgacagccattgacaaaagaagacgaacacaagccatntcggctactggagagaaagtatctatgtagtcctatccatagacctgagtgtaaccttttgccaccaaacgttccttgaaacaatcaatggttccatcagggccaattttaagagtatacaatcaccgacacctaacaacggattttcca

SEQ ID NO: 14261 - DNA, 317 bp, Glycine max
gcgtctcgatatattacgggactcaatcggacatcagagataaaagttattggttgttgaattatctcagagcttctgcattccatttcgagcatctcgatatattacgggactcaatcagacatccgagtaaaaagttattgtagtttcaatttgctcagggcttcggtattccatatcgagcgtctcgatgtattacgggactcaatcagacatccgagtaaaaagtattgtcgttgaattgctagagctctacattcaattcagctttcgattatacggactcatcaacatccagtaaaagtattgcgttgatt

SEQ ID NO: 14262 - DNA, 213 bp, Glycine max
  unsure at all n locations
cctcggatccctgtcagatacaatactagaaggaattccatgcaaccttactacttccttgatgtacaactccactagctttgccattctatacttcatccgagtgaaatgttatgaccattcgaacnnctcgagagccttcgctgttcgacttcgagcgtctcgatatattatgttcctgaatcgaacattcgagtgaaatgtatgacaatc

SEQ ID NO: 14263 - DNA, 162 bp, Glycine max
tgcctatgttgttgtggatgatttctctagatttacctgggtcaactctatcagataaaagtcagacacctttgaagtattcaaggagctgagtctaagacttcaaagagaaaaagactgtgtcatcaagagaatcatgagtgaccatggcagagagtttga

SEQ ID NO: 14264 - DNA, 230 bp, Glycine max
aatgcgccgataccgttgactggtgggtaggtcttccaacgggttgaacacctgaatactgtattttggaaagacccaaaagaaggataaaagtaagacttgcatatgaaagaagaggtccattttctttgatcttccgtactggtctgatctagatgttagacattgtattgatgttatgcacgtggagaaatatgtatgtgacagtgtcattgggacgctccttaaca

SEQ ID NO: 14265 - DNA, 453 bp, Glycine max
  unsure at all n locations
actaagcttggcctntcacgtctggaatatgaatgtggcatatagatccaaagacccttacgtgctttgttgatggcttcttctcgttccaagcttcactcggagtcttgtcttttacagacttagttggacatctggtgagtatgtaaacaacagtgtagactgctctagcccacaatgtgttaggtagtcccttcttctcgagcatacatctagccatttccataactgtgcgattctttctctcggacactccattttgttgaggagaatatgcgactggtagttgtcgctcaatgccttcatcctcacaatatctttcaaactcgcgagaggtgtactctttgtcatgacacttcttagtactattatccagttttcactttgatnttcagcaagggccatgaacatttagaatactccanagacttctgattgttctattagaaaata

SEQ ID NO: 14266 - DNA, 433 bp, Glycine max
  unsure at all n locations
gacgaaggaatgtatctaccttcactcacccaaagatgaatntggctatcgggcttgggatccaatcaataagaaggttgtccgtagcagagatgttgtattcttcgaagaccaaacgatcgaagacattaaaaattcagagaagccaagattgagaagcagtaagaacactgaacttactccagttcgacgtgaggataatgacacaacagaaaatagtgatgctgaagatcatgagcctatgttagagcaaaacaatcaggagactcatgatgaaccaggtcaggaagatcctcaatctagctctctatcagtgccagagccaagacgatcctctagggaaagaaggccatccacttgatataacacagatgagtacgtgatgctcactgatgatggggagcctcaaagcttatagaagccatctatgata

SEQ ID NO: 14267 - DNA, 401 bp, Glycine max
  unsure at all n locations
tagttccttgcttagcccataaaggtttccagataaggctaatgaacttagcatctctatctgacacaataatcctacgcaaaccatagagtctcataatttccccaaagaagagttttgagatgtgggaaacatcatcaaccttatgccatggtataaagtgtgccattnttctaaacctatccaccaccacaaagatagagtctacacgtctttaggttcaaggaagcccaagaacaaagtccatactaatgtctaccgagggtgcaaatgggatgagtaagggtgtgtatagcctatgaggtatcaccctagactagggcttgtaacaagccacacacctagtgcaatcactacaataaaaatgacctatacctacagacaaatactgtcactataag

SEQ ID NO: 14268 - DNA, 400 bp, Glycine max
  unsure at all n locations
cgacaaaccagcatgtntaagtaataataataataataataactattattattattattaaataaaaaaacttctaaataatcaaatatttgaggtaatctaacattagttgatgagtaatctattacatagagattactacagttatatagcccaaacgtaatctattacaaagtttttaattttcaagacaaaatttcaacataaatttcgataccagatgtcaaacataataatgttaggaagtcatacatcgtcggtatcaactctcggagtgcagtttatatatctattgggtaatttcacttgatgttaattgatgttatgataaaatctaacatagtatcggagcctataactcatcttggttctcgcctgtactggtaagctctcttgatct

SEQ ID NO: 14269 - DNA, 413 bp, Glycine max
  unsure at all n locations
acactatcaatctcagctatgtnttcaatacgagcgtctcgaaatcctactggacacaattggacatccgagtgaaaagttattgtcgtttgaatatgtttagagcttctgttntcaattacgagcgtgtgaatatcctacgggacaaaatcggaaattcgagttaaaagttattgtcgttagaagtttctcattgcttccgttttcaattaaaagcatctcgatatcctaccggacacaatcgaaaatccgagtcaaaagttattgtctgtcgaatttgctaagagcttcagttttcaattacgagcgtctagatatattacaagactcaatcagacatccgagttaaaagttattgtcgtntgacttttctgagagcttccgttttgaatgtcgagcgtctcgatatatta

SEQ ID NO: 14270 - DNA, 454 bp, Glycine max
  unsure at all n locations
tgtcttcaacanacaaatcaaaatcaaatttctgatcttcaaaacctagctccagcttcctctcccccatatcaactatgcagcttgcggtcaacatgaatggccttcccaatattacaaggatgtcagtatcttcagagatatccattaccacaaagtctgtcgggaagaataaaatgtttactctgaccaaaacatcttcaattactccatatggcctggtaatggagcagtaagctaattgtaaagtcattcgagtgggcattatttccaactcttccaatcttctgcacatggagagtggcatcaaattgatactggctcccaggccaataagagcttttcccacattgacttctccaattgaacaaggaatctgtacactcccaagatctttatgctagggtggaaggatcttctggatcacagcactgcaatntccttccactatgat

SEQ ID NO: 14271 - DNA, 340 bp, Glycine max
  unsure at all n locations
cgcttgaaattgaataacggatgctctctagaaatcagatggtcataactnttcactcgaatgccagatntaggaacaaaatatatagagacgctcgaaattgaacaacagatgctctctagaaatttaaatggtaaaaatttttcactcggatgttagattcaggcacataatatatcgagaacgttgaaattgaacactaaagctctggtccaattcaaacggccataactattaacatgggtgtatgattgaggcccatgatgtatcgagatgatagaaattgaataacggatgctctcatgacattcaaatggtcacaagtnttcactcgtatgtc

SEQ ID NO: 14272 - DNA, 278 bp, Glycine max
agcttcatggcttggtggtcttggacgtggtcctttgtctttggcttctcaactcaaggaacaaagatttcttattgttgaccccaattgatgacacacagatagtgtttgttgtggggtctttgggtaagtgaacgagcaaaagaagtggtgacatcaccttttcttagaaaccctttgcaaccttctttatactattcttctctagaaactatctctgtggggacactcgattgtccattgagaagtccacttttgaagtgggggatgatgggaat

SEQ ID NO: 14273 - DNA, 207 bp, Glycine max
tcatcatttataaagtggtacacccaaaaatacagataattcgccagctttatgtgcaatttgtgtcccattcaaattatcttcaatacgagtctaaggaataaacccctgttctatggtcttcagataaacgattctctcataagttctggttcgagctcaaattcccctcttccttaacctctgttattattctgatggagtgaa

SEQ ID NO: 14274 - DNA, 335 bp, Glycine max
  unsure at all n locations
tgaaaaannacaacgttttntttttcaaaatatttccatttttatagatgaggcgttatttgatttcgaaatccgattattatattcctaacccgaagtgctccttggtgtattcataaaaagtaataatttttcttcgaatcttagcaattgatatcctttcgaaacaccaattttttcttcatttgaattgacagtgaattctttccgattcttattcgaattatgtattcttttttctaaattaaacaaggcaaggactaacttccgaactgcaagtaaaataaatgatagaatacaacatagatttatctattagctctatgacttgtaat

SEQ ID NO: 14275 - DNA, 458 bp, Glycine max
  unsure at all n locations
agtctaaaagaaaaaagaatactcgttttataaactataaataacattnttacactctcatacttgatgaaagattcaagtaaaaaaaatgcttattgtaaagcattatagttaaattagacccatgaataatatttangaaaaattgcaattgcaatggcacttttaatttataaaaaacattcacctccttttgaataaattntttaagattatgattttttaaatgacgagtcagtaaaaaataattgtgtatgatttttaaaaaatttaaaaatcaacaaacttttattataattcgtaatttgatatcattgcatatactaatagacatttatatnttattatgaaaaaattattanaaacaatcaaataaatagtggttgattaaacaaaaacaatgaatttcttatncgtttatagtaatttttttctttttttctgtgtgataatattat

SEQ ID NO: 14276 - DNA, 404 bp, Glycine max
  unsure at all n locations
ctaagctgaagcaactggatgcatggtaactaggtnacccagctggccttgaatcagaaatctgtacctgtcgcaagggtttgtggtttgtgctcctctgctgaccaccatacagacctttgcccttccatgcagcaacctggagcaattgagcagcctgaagcttatgctgcaaatatttacaatagacctcctcaacctcaacagcaaaatcaaccacagcagaacaattatgacctctccagcaacagatacaaccctggatggaggaatcaccctaatctcagatggtccagccctcagcaacaacagcagcagcctgttccttccttccaaaatgttgctggcccaagcagaccatacattcctccaccaatccaacaacagcaacaaccccagaaaca

SEQ ID NO: 14277 - DNA, 476 bp, Glycine max
  unsure at all n locations
tcttacaagagactaaganatntctgacgannaaatttgagatgaaatatcttggggaagcctctnttgtattaggaatcaagatactaagagatcactctcaaggcatcctaaggttgtcacaagagagttatatcgataaggtcctagatagattcggcatgaaagatagtaaaccagtagatacccagatagctaaaggaaacaaatttagtctcaaacaacaccccaataatgaccttgaaagaatagagatgcaaaatatttcttatgcattagcattagaaagtctaatgtacgcttaagtttgcactcgtctcgatatagcatttgtagtaggagttctgggtagatatntgagtaatcctggaatgcagganaatgtgttatgcgttacctaaagagaaaaaaatgatacatgctcacttatcaaaagtatgagaatcttgagatcattggatactcagactctgatt

SEQ ID NO: 14278 - DNA, 376 bp, Glycine max
  unsure at all n locations
aacattacaatagacctcctcaacctcagcagctttattcaaccacagtagatcaattatgacgctctctagtaacagatacaatcccggatggaggaatcaccctaatctcagatggtctacccctcaacaacaacaacaacaacttgctccttccttccaaaatgctgttggtccaagtagaccatgcgttcctcctncagtgcaacaacaacaacaacaacagcaacaacaacatcaatagagacaacaatccactactgaggcccctcctcaaccttcattagaagaattagtgaggcaaatgacaatacagaacatgcagtttcagcaggagactagagccttgattcagagtttaacaaatcagatgggg

SEQ ID NO: 14279 - DNA, 454 bp, Glycine max
  unsure at all n locations
tgatccttcagtcacctgcggcatgcaagcttatggtcttaggtcttaaccactagtaatcacataaaacgaagtattattgggttactgtattttttattagcacatgatatatatacctttagcggaacagttatacaatggccctggaagaccattaatagtgtaggcatcagacacatttggtcctccacctgtttgcaatgcctgtgttatgactgcctcaggatctgtattccaccattctcctganatatgtngttatatgcatgttaaagataggtcactcctaagtacattaaggtaaatataggaacactatggtatgatgtcacagtcactttcttattaccaaagatgacgggaactttcttgtaagggttggtaaaaggatatggagctccttgcttgggaagaatgatgatacgaccatagagaagtgatcttaaccatg

SEQ ID NO: 14280 - DNA, 366 bp, Glycine max
ataagtggacggagagggagagagagggggcacgaaatgtatgcctcaaatgaggtctgaactctgaagtctaatttttcatatgataaaagctgaaaaaatgcgcacacaaggtctctatttatagcctaagtgtcgcacaaaattggagggaaatgtgaatttctattcaaatgtcacttgaatctgaatttgaattagtggagccaacattggagtcaaaactgcactgattgtgaattcaactatggttcatcttactaatccaagatcaaggcctagattctccactaagtgtgcttatgtgtcatgaagcatgttaagcatgaagggtatgcattaagtgtgactatacaatgtgtcaat

SEQ ID NO: 14281 - DNA, 355 bp, Glycine max
tcacatcttcaggaccaatgtctttcatatcataattactagacaatagagacttcacatcatgtatgaatagcatactactaccaaatatcagcatgtcgtgcacatacaagcataagatgacacattcactctcatcaggttgtttcgcacacactcatttagcaactatcattgatattgaaaagcatatgagagaacaacttgagctgacttttcgcgccattactttggagcttatttcatgaccatattaagatttaacaacctataatctataagtagtactatctagagaatatacaacagacacataatcaacagtttttggtccaacttttcttttcttattaat

SEQ ID NO: 14282 - DNA, 447 bp, Glycine max
  unsure at all n locations
attcctttagtagggaatctatccttcctaagatggagccaaacccagccaccctcattaagaactagctcttttcttcctctattgcctgtagttgaatacacctttgtatggttctctatatggttcttaaccctctcatgcaacttctatacaaatattgacctagattccccttctntatgtataaaagaagtgtccagtgggaagggaatgaggtctaacggtgttaggggattgaacccatagacaacctcaaaaggggactgcttggtggttctatgaacccccctgttgtaggtaaattctacatgaggaagatactcatcccaagacttatggttgcctntcagaagagcccttaaaagggtggataaagacctattcactacctcatgttgcccatcacgttgtggatgacaagtgatagagaatagaagtttagtt

SEQ ID NO: 14283 - DNA, 418 bp, Glycine max
  unsure at all n locations
ggatcttaagtcacctgcangctgcaagctgcatttaagaccatccccccaccccgaatgctgattctcaatccagcagtcccttaccaccttgtggtaatgcttgttattaagccatccatcanagaccttaanaggcttangaccccaatcaatgctcttagatttcatgaggatagggcagtgatcagagtagttcctttcaagggtgtgctgcgaactgtctggccacttaaaaagccaaccatcagagacaacagctctatccaatttgcttttacaggaaccattatgcctaacccatgtgaactgcttacccacactaggaatatcttccacctccatgatagcaagccaatcattgaaatctgacatgatgctggactctgaatttccatgattgcttcccattctctct

SEQ ID NO: 14284 - DNA, 343 bp, Glycine max
ctatcccgcacagatgactatataatcaatgccttcacctcatcctcacaattaatctgcactgactccaactgggtaagaatagtatctaattcattaatatgatcagttatagagataccttctcctatcttgatgatgaacaaccgacacatcaagtatactttgttggcttccaacgacttctcgtacatatctgataatgccttcattaagcccgcagtagtcttctcatttacaatgttgaacttgacgttcttagctaatgtcaatctgatcacgccaagagcctatcgatctagcaatgttcattcttctttgcttatgccgctcgacttaaccc

SEQ ID NO: 14285 - DNA, 463 bp, Glycine max
  unsure at all n locations
attctaatctagaaatccatgaaggtaccttaatgtctgaggtttatgggactaagatggtcattgaccagtccctattctatgatttaacccaattgccaagcgaaggtgtaccatttgaaggtgcactgattgatgattggaagttttatttctctgtacatgatgcccgccgattggtttgtaccaatcaagcagatatgaccggaaggcttcttgccagttcattggcttttgaaagccgcatcctccattaccttattgttcgcatcttgcttccgagatcttcaaaccttgctcatgtttctgaagaagatctcattgtcatgtgggcctttcataaaggtttacaaattgattgggcacatcttgttagatatcgcatgtataaggcattgcaattgaatgccccattgccttatcctcatcttgtatcctttncttaacactcaacatcctctga

SEQ ID NO: 14286 - DNA, 356 bp, Glycine max
tcaaaattaaaaatacccaggaatcttgctcaaaacataatgttgtggcatcggatgactgaactccgagaagtaaagcggtagctgcaagggtgaaccgctggaaacagtttgaccgtgtgataagaagatcatgcggctgagaagccctatgattctgtaacttagttggcgaatggacatgattatgatgcttacactctgtgcgattctctgtagcaccttcaccaccatgtatgcgctcgttgaatcaagtccatgttgccttgtccaggattagaaggtttttgtgaatctacccttctttattcaaccaacccacgcaagcgtccaacctcacaattttggatttgatg

SEQ ID NO: 14287 - DNA, 503 bp, Glycine max
  unsure at all n locations
cttgatggtgttgagaaganatcacatgtttgtcatcatcaataagggggagaatgtgaatgtatgtatatatgnatttgatgatgtcaaagaagaatctaacaagcctgcttcaaatgataagcatntgcttcaagaataattcaagattgcttcaacaaacaaagtcatgtntcaagattcattaaagaccaagccttgccttataacaaagtgctttcaagacattcaaggctcttgtaatcgattaccaggaagtgtaatcgattaccagaagacagggttgaaaaatagctgttgaacaatgttttgannattgaatttcaacatgtaatcgattaccatatgtgcgtaatcgattaccagcaacgaaactttggaaattcaaattcaaaagttataacccttcaaattataactgtgttatcgagtacccacacattataatcgattaccagtggagagttgtcagatnatctgccaacagtcacgatctttcatta

SEQ ID NO: 14288 - DNA, 394 bp, Glycine max
  unsure at all n locations
atgccttagtcaacctagtaactcagctggccataaataaaaaatctgcatctgcatctattactgttgcaagagtctgtggtctatgttcttttgttgatcaccatacagatctctgtccttctttgcagcaatttggagtcaatgagcaacctgaagcctatgctgcaaacatttataatagatcccctcagcagcaaaaccaacaatagtagaataattatgatctntcaagcaacagatacaatctaggttggaggaatcatccaaatctgagatgggcaaatcctccacagcaacaacagcctgtccctcccttccagaatactactggtccaagcaggccatatgttcctcctccaatgcagcagcaacaacaaagacaacaagcaac

SEQ ID NO: 14289 - DNA, 432 bp, Glycine max
  unsure at all n locations
agcttgctntatagactcttcatgtctggccaagaggaccatttagaagagttataacttttagaaaaacttannaaacaattgaaaagtcaaaaaccttttgaagagttacatcttttgatttattcagaaacaatcattggtaatcgattaccaaatcagtgtaatttattacacaaggcttttatgtgaaaggatgtgactcttcacatttngaattgaatttcaatgttcaaaggcactggtaatcgattaccaaaacattgtaatcgattacaactttntgaaattaattggaacgttgtaaattcagtttgaaaactttttcanatccattgtgctactggtaatcgattacaataatctggtaatcgattaccagagagtaaaaactctttggtaaacatgttttgagnancatcatgtgctact

SEQ ID NO: 14290 - DNA, 372 bp, Glycine max
  unsure at all n locations
tctcgatatattatgcgcctgaatcagacttccgtgtcaaaagttatgaccatatgaatntctccactgtattccgtgtgacaagttatgaccatttgaatntctcgatagcattcgttgctcaatatcgagcgtctcgatatataatgcgcctgaatcggacttccgtgtgacaagttatgaccacttgaatttgtcgagagcatccggtgatagatttcgagcatttcgatatattatgcgcctgaatcggacatccgtgtgacaagatatggccatatgatattctcgagagcattcgttgctcaatttcgagcgtcccgatatatgctgcgcgctaatcggacttccgtgtgacaagatatgaccatt

SEQ ID NO: 14291 - DNA, 384 bp, Glycine max
actcagcttcacattcaatttgagcgtctcgatatattactgggctcaatcagacatccgagtaaaaagttattgtcgtatgaattggctcaaagcttcaacattcaacttcgagcgtctcgatatattgcgagactcaatcagacatccgagttaaaagttatagccgcttgaatgggctcagagctacaacatttaattttgagcgtctcgatatttgacgggactcaatcagacatacgagttaaaagttattgtcgtttggattggctcagagcttcaacattcaatttcgagcgtgtcgatatatgactggactcaatcagacatccctgtcaaaagctattgtccgttgaattggctcagaagctcaacattcaattt

SEQ ID NO: 14292 - DNA, 339 bp, Glycine max
  unsure at all n locations
agcttgaaccaattcaaacgacaataactntntactcggatgtctgattgaggcccgtaatatatcgagacgctcgtaattgaatgttgaagctctgagccaattcaaacgacaataactttttactcggatgtctgattgagtcccgtcatatatcgagacgctcgaaattgaatgttgaagctctgagccaattcaaacgacaatatatcttttactcggatgtctgattgaggcccgtcatatatcgagacgctcgaaattgaatgttgaagctttgagccaattcaaacgacaataactnnttactcggatgtctgatagagtctcgcatatatc

SEQ ID NO: 14293 - DNA, 397 bp, Glycine max
  unsure at all n locations
atagctccttcaactgcacaaggctattaatattngaagagtatccttgnggaaccttcacccgacgaagacactgacaaaaacttatcttctccttcttggacaaagtatggcatgctgggggcaggtaaatattctttccatcagaccttggatgcaactatgatcgtatacccatatcagctagatcttgatgggtattcaagccatacttcgtcttgccttgaatgttaatgagcgtcccaatcacactgttgcaaacatttttctccacatgcataacatcaatacaatgtctaacgtcaagatgacaccagtacggaagatcaaagaaaatggacctgcttctccatatgcaactctgacttatatccttcttttgtgtcttcccaaatac

SEQ ID NO: 14294 - DNA, 364 bp, Glycine max
  unsure at all n locations
gctntctgtgtcttctntaataaagatctagtggtagaaacccctactagtggttctgtgttaacttcttatgtgtgtttgaattgtcctgtggagatatctggcacaacattcttgattgatttgatttgtttgcctttgaaccacattgatgttattcttgatatgacttggtcttttttagacgatgtactggtgaactgatttcatgaaagtgtggtggttcgatgattctggagtgagtaatgatatgtattctatctctgccaacccagttgtgacatcttttaaggaagatgctcaagtatacatgatcttgtctagccaggaagtacagacaaagggttctatgtgtgaacctcct

SEQ ID NO: 14295 - DNA, 378 bp, Glycine max
  unsure at all n locations
atcctccgagtcacctgcggcatgcaagcttctggtgggacatctngacttgctttccaatctgacattcaccacagattctgccttcttctattntcagattgggaatgcctctaacagcacctttgtcaatgattttcttcatgcctcttaagtgcagatgtccaaatctatgatggccatatttgacttcatcttctntggaggatagacatgtggaggagtaactggttcttgacgggtcataggtaacagttgtcctttgatctgctgcccttcattagaacttcactcttctcatttgtcaccaagcattctgactnntgtgaagttacattgaatgcttcatcacacaactgactgatgctgatcaagttt

SEQ ID NO: 14296 - DNA, 366 bp, Glycine max
  unsure at all n locations
ctcagcttaacatcagaccacttccagggtgctggaactacttcacatggactngatggcgcctatgcaagttgaaagccttggaggaaagaagtatgcctatgttgttgcggatgatttctccagatttacctgtgtctactttatcagagaaaaatcagacacctttgaagtattcaaggagttgagtctaagactctcaagagaaaaagactgtgtcttcaagagaatcaggagtgaccatggcggagagtctgaaaacagcaagtgtactgaatactgcacatctgaatgcatcattcatgaattctctgcagccattactccacaacaatatggcatacttgaaaggaaaaacatgacttt

SEQ ID NO: 14297 - DNA, 441 bp, Glycine max
  unsure at all n locations
agcttctgtaatcgattataggctatctattcttgtgtaatcgaataccagaacactaaataggctctttcctcataaaaatatctatgtctatgctaaaaacatctaactatagcagtcatcaatactgatactcatttaattcaatcaaacaagaatcaatcacacaataacacaccaatcaaacacaattaaaatcttataatcaaatacaatcaatcaatcattaaccataaatatttcaatcaaccaatcaatccttatttatccaaatcactaatatctaagaggcctaattctcttctaatggaaaagaatgtntcttttgggagaggttgtgtgaagatatcaacaagttgattctttgtatcaacagaattctacacataatctcccttcagaacatgatctcttagaaaatggtgtctaatttctatatgc

SEQ ID NO: 14298 - DNA, 344 bp, Glycine max
agtctcgcgattgtcacgtgctcatgcaacatttgttagctgtggctatacgagacatcttgccaaacaaagtcaggttagccataactcgcctgtgctttttcttccatgctatatgtagcaaagtcattgatcctgtcaagtttgatgagctggaaaatgaggccgcaattatactgtgaaagttggagatgtatattccccctgctttctttgacatcatgattcacttgattgtgcatctggtcagagaaatcaaatgatgtggtcctgtttatctacggtggatgtacctggttgagcaatacatgaagatcttaaatgggtatacaaagaatctatat

SEQ ID NO: 14299 - DNA, 425 bp, Glycine max
  unsure at all n locations
gcttccaacaactganacatatganatattcttcatatgttcccactcacaatcatttgttgggcactaactcaaatcgagtttgtcacccttcataatggaagctacactnggtgaacaatctttcatgttaaatatttctaaaactatattaatataagtctcttgagacaaacccaaaatgcctcgagactcttctctatggatcttaatgccaatgacataagctgtctctcccatatccttcatatcaaagttcttcgagagagattgtttcagctcatatagcatattcttatcattagttgcaagcaaaatattagccacgtataacactcgaaaacanatcttactcccactgaccttttggtatatacattgatccatgatgttttcttcaaaaccgaatgaagtgatgacctcat

SEQ ID NO: 14300 - DNA, 407 bp, Glycine max
  unsure at all n locations
actagatgccttggttaaccaggtaacctagctggccttgaatcagaaatctgtacctctcgcaagagtctgtggtttatgctcttctgtcgaccatcgtacagaccttttcccttctatgcaacaaccaggagcaattgagcagcctgaagcttatgctgcaaacatttacaatagacctcctcaacctcaacagcaaaatcaaccacagcagaacaattatgacctctccagcaatagatacaatcccggatggaggaatcatcccaaccttagatggtcgagtccttcacaacagcagcaacaacaacaacagccttattntcataatgctgctggcccaagcagaccatacattcctccaccaatccagcaacaacaacaacaacaacaaccccagaaacaac

SEQ ID NO: 14301 - DNA, 439 bp, Glycine max
  unsure at all n locations
acttggttacttattccaaccgtcatcctcgttgccactgtagagggtgactgaccaccacatccacttaattctacaagtcgcatcaatgagcgtgcgtccttatctgtacccccattaccagaagtaggaaattgagcttcaggtggaatcaatgttgcaaaaggggcttattagtccgagtacaagtcatttctcgtcactagtgctgctcatcangaaacatgatgactcttggcgattttgcgtggactatagagcactcaatgtggtgactgtctgtgactgggttcctatcctcaccatcgatgagcttctcgatgaattgngcaaagcttgttggatttcgaaattggatttattgcaaggctaccaccatattcggatgcattcaccgaacattgccaaaacagcatttcggacgcaccatgggcactat

SEQ ID NO: 14302 - DNA, 345 bp, Glycine max
  unsure at all n locations
agcttctatagaagaatcattcctaatttctctacaattgcttcacctctcaatgagctggtgaagaagaatgtggcatttacctggggtgaaaaacaagagcaagcctttgctttgctcaaagaaaagcttactaggcacctgttctagctcttcctgacttttctaaaaattttgagctagaatgtgatgcctctggagtgggagttagagctatcttgttacaaggtgggcaccctatngattattttagagaaaaatttcatggtgccaccctcaactaccccacctatgataaagagctntatgatttaataagagccttccgaacttgggaacattatc

SEQ ID NO: 14303 - DNA, 322 bp, Glycine max
atctgaagtacatctgctctaatcttggtaagacgatcatcaagaccatctaagaaggtgtagactctgtcttcttgcaaaattaaattatatctctgaatatcagcatcacacaacatatgatttggtcgacgaagatcgatctctctccatagtccttgtaggttgttataatacgtttcaatagatctgtcaccttgcatgagtctggtcactcttcttttgagatcatatacttgtgatgtatcaccgctatcaaagtatgttgtagcaatactatcccaaacaaccttagccgtcagaaatctatataaagttctca

SEQ ID NO: 14304 - DNA, 267 bp, Glycine max
  unsure at all n locations
caagtatagagntactattatacactaaagctccattaaaaactgaaccatgagtacataatatactacattgctactgcattaaacatgttattggtattaaccaactccaggacctacaggaccctttcccttatttgtgagaaaactagcgtaatataatctagttctataattaactaaagagttaagataagctatcccaaanacgcaatatctccttcttatgtctcgtcaacaagttgaatttggattaactaagtgata

SEQ ID NO: 14305 - DNA, 477 bp, Glycine max
  unsure at all n locations
cttgagtcccgcgatctctgagtcacctgcgggcatgcaagcttgcaatgaaattaacataacaatgtatttatatatgtgngacaaaataatacaaanatgatatataattcttaatatagaattgacattcatttggtccaagttaaatgcattttggtagttattatatgaggcaaggcttatgntttcatcttcctaacatgtaaaattaacatcattttttaacattccttttgataaaattgtatatagtcatttgtgtacaaattatttgcatttatgtttcaaatttgtacttaggcatggatcgtaagattacaaatctattctttcatactcgaaacgttctttcaatagtgcaccttaaacttatactggagtgataataattaaaaatttcattattatctgcaaactcagatctatgtctaanattaggatggtggtaacgttacatatgtacggacaacatat

SEQ ID NO: 14306 - DNA, 374 bp, Glycine max
  unsure at all n locations
aagcttccttgataagctagaggggtgctactcacatctctccaatagctaagttcaccccgatgccaaaatacatgaaaaatacaaaaagtctcttctacaaagactactcaaaatgccctaaaatacaaggctaaaaccctattgtactagggtacccttaacttgaaaggtagggtgcccttaattnttagcataccctataaacctaaaaattgccaaaatacaaggccccaaagaaggaaaccctattctaatatttacaaagaangtgggctcatacttagcccatgggcccaaattctaccataaggctcatgagaaccctaaggtcttctactgcatatctggcccaatattcttggagtcttcta

SEQ ID NO: 14307 - DNA, 426 bp, Glycine max
  unsure at all n locations
gctatgctgatatattacaatagacctcctcaacctcagcagctaaatcaaccacaacagaacaattatgacctctccagcaacagatacaaccctggatggaggaatcaccctaacctcagatggtccagccctcaacaacaacaacagcagcctgctccttccttccaaaatgctgctggcccaagcagaccatacattcctccaccaatccaacaacagcaacaaccccagaaacaaccaacagttgaggcccctccacaaccttccctcgaagaacttgtgaggcaaatgactatgcaaaacatgtagtttcagcaagagaccagagcctncattcagagcttaaccaatcagatgggacgaatggctacccaattgaatcaacaacagtccccagaatcttgacagctaccttctcaagct

SEQ ID NO: 14308 - DNA, 328 bp, Glycine max
  unsure at all n locations
attgtataatttatattcttcatttatatatnttggtactttataaaaatattctattaatctttctattatcaatattataaaaaataaaataataagattagtatcaagttattttcttattctttttctttatttaaaaaatacattatcttatggggagatttttttattacacatacaaataaaagaaaatccttgtgagagcaatggcccttgcaaaattatacatgcatcgccaatgatcattgtgcatgaaatacttgaatagttattaatcttgattgtctcaatanaataattaattaaaatttanagaatcatttat

SEQ ID NO: 14309 - DNA, 414 bp, Glycine max
  unsure at all n locations
ttattttcttcctccatctcccaatagcaaactttatagcagacatgagattattccataaaataaaaatatgatacaaacttacaagtgtctatatggcttcatagtcatctgctgcaggggctgngggagcatcagctagagcagataacacaacaaaggcaccaaataagattgtgataatggcagtgaagttgacaagcaaagcctcagaaccatatttgtccaatcctgagttctcaaggaaagtgagcttctccagatacccaagagcagcagtgcccacagccaagacatatacaaacagcccatatagcgcgtgccaaggaagtgaggcgcgtctaatgtctggagtcccaccagngaagaataagatcacaaacccatatatccacttcagggaaccaacacaat

SEQ ID NO: 14310 - DNA, 397 bp, Glycine max
  unsure at all n locations
tagttcctagcttagcccataaggttttcgagatatgtctattgaacttagcatctctatctaacacaatggtcctaggcaaaccatggagtctcacaacttccctgaagaagagttntgagatgtgagaagcatcatcaaccttgtggcatggtataaagtatgccatcttgctaaacctaccaaccaccattaagatagagtctacacctctttgggttctaggaagcccaaggacaaagtatatactaatgtctatccagtgtgcagatggcatgggtaagggtgtgtatagcctatgaggcatcaccctagacttggcttgaaataagccacacctagtgcaatgcttatggacatctttcttcatatgggaccaatagaacttttctatgag

SEQ ID NO: 14311 - DNA, 364 bp, Glycine max
  unsure at all n locations
tacgtgcttctactcctattgaaaatgtgttgctagtataaggtttgaaacatagtttattaagcgttagtcaattatgagataaaggatataaagtatctcttgattctgaaaaatgtgttattaagcatgagcatgacaaacatattgaacatacaggttttagagaatataatgtctacatgattgatctacaacacaaatctataaatgataaatgctctntaagtaaagattgtgatccatggttatggcataagagaattgctcatattaacatggatcatctaaatagggtaatttcacaagatctagttattggactgcctatattaatatttgaacaagataagttatgtgatgc

SEQ ID NO: 14312 - DNA, 331 bp, Glycine max
  unsure at all n locations
agagttgatgttttctgtatggatgggaactcangcggatgaagctttttctgaggcttggcattcagatgcatcagaggctagtggtgaaaacattgctcacactcgttccaaggtatatatttctcctaagctttggtatcttagaattaatgtgattcaagcccaggatttgttgctaacaaacaagagtggcaataataactcggaaattttcatccaaggtggtttggggaacttggctctgaggagccgttctataaagtgtagtacaagcccctcgtggaatgaggatatgatgttcgttgtggcagaaccctttgatgattgc

SEQ ID NO: 14313 - DNA, 344 bp, Glycine max
  unsure at all n locations
tgagaaaaatgagatgacattaactntttactcggatgtcttattgaatcccgtaatatatcgtcacactcgtatttgataacataggctctgagcaaaatcaaacgacaataactttcaacacggatgtccgaatgaatcctgtaatatatcgagacgctcgtatttgaaaacggaagctctgagcaaattcaaccgacgataacattttactcggatgtctgattgtgtcccgtagtatatcgagacgcttgaaatttataatagaagctctgagcagtatcaaacgacaataactntttactcggatgtccgattgtatcccgtagtgtatcgagaagctc

SEQ ID NO: 14314 - DNA, 392 bp, Glycine max
ctattccaagttcattaaccatacctttgttctagatttcttccttcactccttcagctagggccatgtattctgcttcagttgttgaaagagcaacaactgattgttgtaccaaacaaagtaaacacatatcctgttaaggatttccttgtgtctacatttcctgcaaaatctgcatctacatagcttgtgattgttgcctcttgtgctgtcttcttgtaccttaatccaacttgcaaagatccatttagataccttagtgtccacttcatagcttcccagtgtgcactgccaggatctcccatgaatctgcttattatgcttacagcatgagccaagtcaggtctgctgcataccattccatacattatgcttccaacaccactggcata

SEQ ID NO: 14315 - DNA, 420 bp, Glycine max
  unsure at all n locations
gctgcttctacatctgttngctntaattgcagagtgtatagttgcaacatgtggacaaattcgaaatacatcaatttattggattcagtcaatgttctcacatcaagttgagtatgaaaactgctagtcccaaatgtgattattacttgatgatccacattccccttgctgcaatctttgtaaaaagacaaatccctacacataagtcaggcacatgtcggatattgtacctacacaacccattnttgaagatttccatgagttggaatggagcagacaagatctttctgaacttccttaaatatatttaccanattggaagggactttgaccccttcaggaactgagaatgaaggccctattgcttggccaggcccatgataagggttctatgttagacaagtgtgctcagatatctta

SEQ ID NO: 14316 - DNA, 507 bp, Glycine max
  unsure at all n locations
tctanactntgtacaagaatgaagctctgataccacttgttagacaagtggcctcagatatcttaagaagggggggttgaattaagatattccaaactgtttcccctaattaaaaatctatttcactgtttactcaagttatgaattcccttaatgaaaatcttcttaaatattaatttaaatgaaacaatttgaatatgaatataaagcaataataaataaaggagattaagggaagagaaaatgcaaactcagttntatactggttcggccacacccttgtgcctacgtccagtccccaagcaacccgcttgagagttccactatcttgtaaattccttttacaagttctaaacacacaaggacaatccttcctttgtgtttagagatcctntacaacaagagactcacagtctcttaatcccttagagaatgagaagaagaagaagaacanatctctctagaaagagatggattttacagatngagcactcanataattcctta

SEQ ID NO: 14317 - DNA, 426 bp, Glycine max
  unsure at all n locations
agctntgtatgtgtataaggtgtaggacacccctatgttggttagagcccggagaatgactcgccttatgaccagaagtggtacagcaaaccactgagaaagttaagttaattcaggaaaggataagaactgctcagagtaggctgaaaagntatcatgataagaggaggaaagatcacgaattcgaggttggtgatcatgtattcttgagagtcactctgtggactgnngttggtcgagcattgaaatcccgaaaactcacatctcgctttattggtcctttccaaattcttaagagagttggccctgtggcatgccataatgcactacccccgtctctttctaatcttcacaatgtctttcatgtgtctcaactccgtaagtgtatctgtgatccatcccatgtgattgaattggatgatgtac

SEQ ID NO: 14318 - DNA, 419 bp, Glycine max
  unsure at all n locations
gcttcctgtttgctttacagntgatgctataattcatcattagaatatgccttttctttntattntaaagatgaaatctcatacaattgtctaatttccatcagaaggcaatgaatatgccaatcactgtggaaggaaatgagctgagtagatttattgacccgccaggagatgcctacttggatgatttatttcatccattggataaacaacctgtggaggttgtagcagaggcgtccacttctacatccacttcacatatgactaaaggtaatgcatctgcaattgatggtgtgaaaaatgacttggctaaagagttgagagctaccattgctcgaaagcaatgggagaaggatagtgaaatnggacatgccaacaatggcgggaatcttttgaccgagtgatgataggcgtctaaa

SEQ ID NO: 14319 - DNA, 248 bp, Glycine max
tcataagttatcacacggaggtccgagtcacgaacatcacatatcgagacgctcgataaggaacaactgaagccctttatatatagaaaaggccataacttttcactcgcatgtccttttcatgcgcataatatatcgagacgctcgaagttcacaacggaagctctcgagaaatgaaattggcttaactttcactcggaatccgattgggcacataacatattgaacactcgaaattgacaacagaa

SEQ ID NO: 14320 - DNA, 397 bp, Glycine max
agcttgaaactcgagggagggaggataatctgagactctattaaaagatctcaccttttgtcagttgtggaatgcacacacacatacacacaaacaatcagtacagataatgaaaatcatatgggcatacaatccatttgacatacctaagcaagctatcaaatatctttcaaagagtataatgcaaaagcttcatagcattcccggataatttcgctgttaaatgctgcatcataattcaatactgacaaaaactgcaccatacaaacatcagaacctacaaatgcattattacattctatttaaaagaagaaacaaaaaatgaaaagactaagaacttgattatcaattatgtacagatagctgaaaatgctagtattaatgcttgtagtactca

SEQ ID NO: 14321 - DNA, 409 bp, Glycine max
  unsure at all n locations
tcttctctgggttcttcgggggaagatgatgaatgggaaacagtggggccgaagaataaatatactgttacaaggactcaaagctttctcccatcagaattaagtggtatttttggaggacaacttanaagtttggtgagactaaaggtacaaaacaactctataatatattagtgaagggattttttttgttttaaatgtcaacttcattaagattttgggaaatttcatttgaccagtctgttgcttcgtgctgatattcttcaaagaaaaaatgaacatgtaaataaagtatgtattatataaaaaaaacattatggccattggcacgatttctttttgtcatttaagaaatagagcntctgctactgttcaaccatatctctggctccatcttgacatctatcct

SEQ ID NO: 14322 - DNA, 359 bp, Glycine max
  unsure at all n locations
actaagctntanaagattggctaagattttgttaanacataagcacttagacaatgaaggaaagctggagttgctgcacatgatgtccaacgttatgtcaaagaataagatcgggctgcacaatgcacaaggcaagatgaaatgtcaaatgaagaatcgaagctgcaggattcacgatgtcggatacaatgtccaggacatcctgcccganacactggaggtgctgtacaatgtacaatgcaagataaaagtcaagtgaagaagtgaaactgcaggatccacgatgtcggatacgatgtcctgacatccggcccgataatactggacatatgaatctgttatatctttaacagattatt

SEQ ID NO: 14323 - DNA, 401 bp, Glycine max
  unsure at all n locations
agcttgcaatccaaaggtaggaaactgagcgaatccgcaatcctgtgtccctgagaagaaccacttgaaaaaaccccacatgaaactgatggaaaaatacttcaagaacccaccaacttgcttcctgaaatacaagataattaatcaactcaatcattatctntaattaaatgattaattattaggacaacttataatccagttccttaactgttttttgtgttgatttttccagccagaattgaagttttacttcagtaacctgtattaatccttaatactacaaaactattataactctaactttaattggtgtaccaatatcaaaattacaaattatcatatcaattttattntaaattaanaagaacaagaatnttgatgactcaatgagaggagta

SEQ ID NO: 14324 - DNA, 256 bp, Glycine max
  unsure at all n locations
atggtccaagatcttccttctcgcctcttccatttttttgttgaaattgctcttggagggaatggaagaaggatatgctgcttctctctagaatcacctgcatacaaattgtaggaacttacccttacattttgccatcatatctttctggagtagagtgaggttgggcaggttccattgcggatgacgaagatgttgctggttgagggccttgacactgccttnccgacctcaatgcaatgacacctcacatttt

SEQ ID NO: 14325 - DNA, 410 bp, Glycine max
agcttcttagtctcagatgatgcagctgagtttgtagctacctcatgcactcctctaatgactatggcatcatttctggcgctaaactgctgagagttggaagccatcttctcaattaaatttctggcttcagcaggagtcatgtctccaagggctccaccactggcagcatctatcatacttctctccatattactgagtccttcataaaaatattggagaagaagttgttctgaaatctgatggtgggggcaactagcacatagtttcttaaatctctcccagtactcattcaggctctctccattgagttgtctaatacctgagatatccttcctgatggctgtggtcctggaagcagggaaaattttttctaagaatactctcttaaggtcatcccaactcgtgat

SEQ ID NO: 14326 - DNA, 454 bp, Glycine max
  unsure at all n locations
agctatgagcanattcaaacgacaataactctttactcggatgtctgattgagtcctgtaatatatcgagacgctcgaaatggaataccgaagctctgagcaaatttaaacgacaataacctttttactcggatgtctgattgagtcccgtaatatatcgagatgctagaaattgaatgttgaagctctgatcaaattcaaacaacaataactttttactctgatgtccgattgagtcccgtaatatatcgagacgctcgaaatggaataccgaagccctgagcaaattcaaactacaataactttttactcggatgtccgattgagtcccgtaatatatcgaacagctcgaaattgaatgtagaagctttgagcaaattcatacgaacaatactctttactcggatggtctgatgagtcccgtaatatatcgagacgctcgaaatgaataccg

SEQ ID NO: 14327 - DNA, 305 bp, Glycine max
atcttagagtcgactgcgctcgctgaatgacacgagcttcagaatttgattcttacctttcttccggaggccatcgggacttactgaggaaacgctcgaaatgacaacggagcttcgacaattcgatggtcataactttcaacggatgtgcgattctgggacataacacattcaagacgcttcgaatattgaacaacggaagctctagagaaattcgaatgggcataacattctacacaaatatccgatttgggaaaataatatatcgagatgctcaaaaataaacaacggaatctctagagaaa

SEQ ID NO: 14328 - DNA, 319 bp, Glycine max
  unsure at all n locations
agctngaatcagacatccgtgtgagaagttattgtccattgaatttctcaagagcttccgtagttcaatttcgagcttctcgacatattatgcgcncgaatcggacatccgtgtgaaaagatatgaccatttgaatatctcgagagcttacgatgtttaatttcgagtgtatcgatatattntaaacctgaatcggacctcagtgtgaaaagttatgactatttgcatttccggagagattncgatgntttatttcgagcgtatctatatattataagcctcaatcggacatccgtgtgaaaagttatgaccatttgaa

SEQ ID NO: 14329 - DNA, 405 bp, Glycine max
  unsure at all n locations
agcttgcccttcaactcattcttatacgagataaagtacttagttagactgaggggacacttgacacactcaaactaagtaccccctttgacaacatattcacatattntatacagcacgtcttgaccctcaacatatatggacaatgagaatcactcagccgtgattatcaccaataaactcacttaaggataattacttgattagaagtgtctaagcatgattagaaggtgtattacacaactggtaatcagccattgcagcagcacttcacttctcttttgacgtatgcaactatccaacactattagaaaatatgctttctacatcnggtatttatgactttcaacatcggtttttgaaccgatgttgaaagtaccgacgttgatagtattatcgttaaca

SEQ ID NO: 14330 - DNA, 450 bp, Glycine max
  unsure at all n locations
catgcaagctngaagcgacttccaatatatatgcatggatcttgttgctgncaattggattcaaatgtttttgcgttaggtctcaaccaagttatctgttgggtctcaatcaagagaaggtagctattttgaaggtttagatcttctacaatgatattttcattgtacaagatttttttaatagacaaataaaatatatattatataagtaaaagaattctggcaggatcatgaataattcccccacgaccccaggccactagacccttaattaacggcattgggaaagattntagtcatagaaattatttaatttaatttaatttataaaacaaatgttctannatataaagttaatgatcttaatttatactatatntaattataatcaacattttcttaagttatgttaacatcatgataatgagatcacttaattattcttgatgt

SEQ ID NO: 14331 - DNA, 308 bp, Glycine max
agctggtcagcaagggagataaatcataacttcttttaaatctaaagatgttgtttccacttccagaccattgtaggtattgcacacggatctatttggaccaacctgaacattgagtttgggaggaaagaaatatgatttttcatagttgatgactattcaagataaacttgggtatacttttttctcataattatgagtctttcaagggcttttaaatattttgtaaaagagttcacaatgaacaagacttttgtatctcttctattagccatgacactgagtttgaacatgttgagatcagatca

SEQ ID NO: 14332 - DNA, 343 bp, Glycine max
  unsure at all n locations
agcttgccaatgttcaaaggatgaaagccatctacatccttctcaaggctgatttcagtcagaactttctcttcatttatgtgcttangcaacggaagctgaaccaatatacctgcggatattaacaaaccaagcctcacaataaaaaaaaaggcccanaacataaaagtgtaatcgatattaaaaataacacatgcatgaattgaaaaagcatgtgttcaggcatgtaaagtaattgaggcacaaaaatgtgaagttaattgataagtatgatgaaaatcgaanagagtgtaataagtgacgaaccatgtacatcanggttaacattcaactcgtgaacttg

SEQ ID NO: 14333 - DNA, 376 bp, Glycine max
  unsure at all n locations
gcttgaatgcactattcaatggtgttgactataacatcttcagactgatcaacacttgcacagtggccaaagatgcatgggagatcctgaaaatcactcatgaaggaacctccaaagtaaagatgtccagattgcaactcctggctacaaaattcgaacatctgaagatgaaggaggaagagtgtattcatgacttccacatgaacattctttgaaatgccaatgcttgcactgccttgggagagaggataacagatgaaaagctggtgagaaagatcctcagatccttgcctaagagattngacatganagtcactgcaatagaggaggcccaagacatttgcaacatgagagttgatgaactcattggttctct

SEQ ID NO: 14334 - DNA, 207 bp, Glycine max
  unsure at all n locations
accatacagaccttttgcctttcatgcaagcacctggagcaattgagcagcctgatgcttatgctgcanatattacaatagacctcctcaaccccagcagncaaatcaaacacagcagagcaattatgacctttccagcaacagatacaaccctggatggaggaatcaccctaacctcagatggtgcagccctcagcaacaacaaca

SEQ ID NO: 14335 - DNA, 381 bp, Glycine max
  unsure at all n locations
gctngtcatcccacaactgataattccctttattttttgcataaantttgcctgctctaggtatttggaggttttcctgagtcaaaacgaattcgccatacatcgggtccaatgtaaacacaaacactccattatcaagggtgagaacaaagattattgagctagaatacatgcacgaaccagctgcaagaaaggtgcttccgggttggcacacgttcacaacacatctttgttctgttgtgtcatgctgcaaattagcatatgcatcacattaagcactgaattcactaacaatcctttgtgcaattgtttataactctttcttttaagatagtgattaggaggagggtggaagctccttccatgatcaaggtaatactt

SEQ ID NO: 14336 - DNA, 462 bp, Glycine max
  unsure at all n locations
tttattacttcccaaagcttgcanaggatgctgggtagggtaggagaatcaaaatccatggagcaatgcacaactatgattggccactctgatttgaatggagatggcctgctttgctttgatgaatttagagtcatgatgcagcgatgagtctttgtctttacttgatttaatgggggatggggttgaatttcattcatttatttgtaattagattttaaatcttgtgtgatgcacgaattctattacattatatattnttttatatttatataaaaatgaatatgcattaataaaattaaatcttataatacttattagaatataaatgtaattatactaaaattgagaaatatatgtattttaattgcgagatgtattaatataagtctaatgaattattttatgttaaaaagttggttgactgtnttgaccattaactcaatgtanatttacaacaca

SEQ ID NO: 14337 - DNA, 240 bp, Glycine max
  unsure at all n locations
atgaccattngaatttctcgagaggtttcgatgttcaatttccagcatccccatatgtgatgttcttgaatcggacctccgtgtgaaaagttatgaccatttgacattctcgtgacgctccggtgtttaatatccagcgtctcgatatgtaatgttcctgaatcggacctccgtgtgataacctatgaccatttgaatttctcgaaagcttccgttgttcaattatgagcatctcaatat

SEQ ID NO: 14338 - DNA, 430 bp, Glycine max
  unsure at all n locations
tgcagcttgtggattaaattatatttttttatatatagcataacaacggctaataatgctaattatttaaccatctaacatttaatcattgaattacaatgtgttatccatttactaagntattcatttacaacccatcccatcatatatattatgtttggtgtctattatataatattaagaataattttataagtcatatgataattatttattattgaatgataatttaaaattattttacattatttaagcatgattattaaatactagatatttgtttatgaatttatatattaaataaagtgatacgatcacacttgattttatgtcatgaattcgattaattcactgatttaattaacacaaaaatatttataatatgctacacgcacacgactcattgattacacctacaagaaaatacata

SEQ ID NO: 14339 - DNA, 359 bp, Glycine max
  unsure at all n locations
gcttgtaggccttgatcttctttattaatatagtctttngcttcttgaagatcaatggaagtggaatagagaatgaggaaaggtgattggagatgccactttaaggagaagatgagtcaagaacatgctcactaccataggaagccatggataatagcttgaaggtaggagaatatgagtggagggagaggcatagaggggggaacaaaatttatgcctcagatgaggtcagaactttgaagtctaatttctcanatgatcaaagttgaaaaaattcacacacaaggcctctatttatagcctaagtgtcacacaaaattggaggggaagattgaattctattcaaatctatcttgaat

SEQ ID NO: 14340 - DNA, 328 bp, Glycine max
gcttctcgatatgttatgcgtctgaatctgttatgcgagtgaaaaattatgaccatcttaatttcccgagagctctcgttgttcaatattctagcatctcgatacgctatgtgcctgaatccgacatgcgagtgaaaagatatgaccatttgaatttcttgagagcttccgttgttaaatctctagcgattcgatacgctatgcgcctacattgaacatgcgagtgaaaagttatgaccattttaatttctcgagagactccggtggtcaaattcgagcgtcttgatatggtatgcgcctgaatcggacatgcgcatgaaaagttatg

SEQ ID NO: 14341 - DNA, 491 bp, Glycine max
  unsure at all n locations
ctgcagctgaagagtttggctttacatgccttactcccttaagtagtatttgtattggttattatattgaatgttacatcttagtccatatcatatcttttgttcatcatgcatcatcatgagtgatgcaatcctaccccccaagagcattggatagaagactccaagaagattgggccagagatgccagagaaggccccagggttctcatgagccttagggtagatttcgggcccatgggctaagtatgagcccacttatctttgtacatattatattaaggtttcattatatttgggccttgtatttagggcttcatagtgtaggagaggtaccctagtaatgtaggaattttaagcccttgtatttanggcttcatggtatgtcttgatgggttaatcgatattgcctatataatcgatacacaactattttggacatgactgaatnttcaggagctcttcatcgatatatgtatatatcgatactta

SEQ ID NO: 14342 - DNA, 304 bp, Glycine max
  unsure at all n locations
agcttcatgatggtgctaagagagtcatcaataatgtaaggcttatcccagnattgaagagaaatttgatttctctgagtgagtttgacaaacaaggctatgtgttcanagaggagaatggagttctaaaggttctaaagtgctccataatattcatgaaagggatgcaaaagaatggcttgtattctctgattggagaagtgatgattggatcagctgttgcagtttctgtcaaaagggtgtcaaagactgaactatggcacagaaggttangacatgtgagtgagagggggttgattgaact

SEQ ID NO: 14343 - DNA, 372 bp, Glycine max
  unsure at all n locations
atgtcttagatctcaacgacactcttgattgcnaatttacttttcctattatcaattcccatacaaattccttagtcattctactagtatatgtagatgacatcatcctatcagggcccaatattgtcttcgtacaagctgttcagaccaaattacagtctctgttcaattgaagatccatgagcctttgaaatattctcttggcttagaaatagtcaaattcaacagaggcatctcactatcccaacgaanatatgctctatctctttnggaagatacaggtttcttggcctgcaaacctctcaatttaccaatggatcccaatctgagactcaatcttcatgatagagactctactcctgatccatcaat

SEQ ID NO: 14344 - DNA, 378 bp, Glycine max
  unsure at all n locations
gcatgcgagctagcacatatataagtatatcagcgtgacattgttcgtctaaatgtgacatgtttggataaattcccaataagcacggataaaagaaaataaattaaattaaatgtttttgacatattaaaattaacttatgcacatattaatttataaaatctctgtcatttaacttcttcaaaagacttttgacttgtttataaactaattntaatttatggaaaaaattaaatttattttactccttattctcttctcttacaaccgnttattgataagtttattcaaataaaacctaaatttacatcttctctgcaattctgaattagtgaatcactgattgaaatgaatntaactacacattactggttttca

SEQ ID NO: 14345 - DNA, 378 bp, Glycine max
  unsure at all n locations
agcttctagttggcattgattcttggtgtattcttttaacaccttcatgtaccgctcaactggatacatccaccgtaaaaaaaaggaccacataaccaaatctccctaacaagatgaacaattaagtgaaccattatgttaaaaaatgatggaggaaaatacatctctaattgacaaaggacaatgacagcctcattctccanatcatctaattgtcgagggttgatgactntgctatagatagtattaaaaacaaagcacanatgagttatggcaaccctaacgttgttaggcaggataccccgcatcgctacagccaatagttggtgcattaagacgtgacaatcacaagactttcaagccgaccaattgagatca

SEQ ID NO: 14346 - DNA, 496 bp, Glycine max
  unsure at all n locations
gcttcttagacttgatcacccttcctacactcgttgtangtgtaacctccaagaacacatgatcacccatttctaactctagcggtctncatcgcttatccatataagacttctnacctacttgtcatgctngcatccttttctgaattaagttgatcttctctatagttggttgtaaggactctagccccacaaccatgttcacaccatcttgataccaacaaagagatgtcctacacctcctatctagcatgattgttgtangtgaattccacaacaggtagaacctcttccccactcccaaggtgatcaaagacacaagccctcaacanatcctctaatgataggatcttcctcttggactgcacatncgttgatcgaggccgtacccgaatcanataaaaattaanaatgtagtatctaggaagtgatcctangtcatctcccaacgagcaatggtcaatcaaacattcataacagatagtaataaaatagt

SEQ ID NO: 14347 - DNA, 498 bp, Glycine max
  unsure at all n locations
agcttgaataaatatattattcaattttaatattatattttcataaaaaagaaaaaaaaagcacatcatcttaatgctttataaacaaatattaaataaataaaatgcatgaattaatattcactatcttaaaaacatttaatatttttatttaataagattaattaaaaaaatgtaactataagtagatntagaattatgttttattagaattatatacaaatccttccaatgaattagaatcataatggcaagagaccaactttngttattttttcttcaaaataataaaatataaaaaattattcaaattatttaaataacatttattgtatttaaaattaanaatngattcaccagttaacccgttattccacagacccacttaacctangagtngcatacatannatattgatccaacgtgtcatatttatatatttgaagaaatatactcatattanaaaatttaattatatctacacttgtgtattttata

SEQ ID NO: 14348 - DNA, 277 bp, Glycine max
  unsure at all n locations
agcttccattgttcaatattgggcgtctattatattatgtgcgtgagtcggacctctgagaganaagctatgaccatttgaatcgctcaatagctttcactatcaatttcgagcgtctcgatatattatacgcctgaatcggacctccgagtgaaaaggaatgaccatttgaatttctcaagagctctcgttgttcaatttcgagcgtctcgatattctatgtgcctgaatcggacctccgagtaaaagtcatgaccattagaatatctcgagagct

SEQ ID NO: 14349 - DNA, 449 bp, Glycine max
  unsure at all n locations
agcttgttgaatactcaatgctaaatgtgtttggatgttcgacatactatcatgtaagtgaaggtaagatggagtccacacccaccacaggattctttatgggatatggagatggagtcaaaggattataagtctggtcttcatctgaaagaaaggccattctgagtagagatgtcatctttgacaaactctctatgttgcattcaaaattcaatgaagaattgggcaaagctaacgatgtcattaagcaggtggattntgatagctctacaataaaaaaacataagcaattaggatcttcaaatgcaccttcaacatcaaaacacaacaccagttaaggcgattgactggacgagtcaaaaccattcatagaagctaagaaccacaacacccagatagacataaaggcatatcacagctcttgaaagatatgattctgagatagtgtc

SEQ ID NO: 14350 - DNA, 359 bp, Glycine max
  unsure at all n locations
agcttcaacatcagactccttncaggtgctttaactacttcacatggacttgatggggcctatgcatgttgaaagccttggaggaaagaggtatgcctatgttgttgtggatgatttctccagatttacctgcgtcaactttatcagagagaaatcagaaacctttgaagtattcaaagagttgagtctaagacttcaaagagaaaaggatcgtgtcatcaagagaatcatgagtgaccatggcagagaatttgaaaacagcaggttcactgaattctgcacatctgaaggcatcactcataagttctctgcagccattacaccacaacagaatggcatatttgaaaggaaaacaggac

SEQ ID NO: 14351 - DNA, 414 bp, Glycine max
  unsure at all n locations
catgcacgcctcttctagtgtttaaaaaaattgagttgtactatattatttctagatgtcataaattaatatcagcaagtcattaagataacaatattgtgattagcacttaattaaatttattagccaattttcatctttagcttaattntctgtcaccaatccgcaatcctcctttcaatntgtgtacatttgtattaattgactatcactgcaaatccattaaacaatgtttatagaaatattcaaaaatactttattaatttattcagaaaaaagatgtaatatttttgcatttcataaaggcaattgtcaatagaatntcatgatatatggaaataaaaattagtaaatacataactactaannaattataaaatttaaagtaagtgccaagtttagtataaaaaatac

SEQ ID NO: 14352 - DNA, 415 bp, Glycine max
  unsure at all n locations
agtcacctgcggcatgcaagctngcatacaagattctccttgcctggcacttcaaaaccttcttgttgggtcatatagatgtcttcctctaaatccccatgcaagaatgcagttntaacatctaactgctccaagtgaagattctctgcagctactatgctcagaataactctgatggtagtcatctttacaactggagagaagatctctgtgaaatcaattccttgtttctgctgaaaccctttcaccacaagtctcgccttgtatcttcttctaccgtcagattctttctttagcctatagacccacctattctgtaatgccttctttccttctggcaatttagttaaagaccacgtcttattcttctgaagggatgtcatctcatctttcatcgctagctcccactcaatag

SEQ ID NO: 14353 - DNA, 410 bp, Glycine max
  unsure at all n locations
agcttagactgagttcagcctaccatcctcatactgatgcccaaactgaacggaccattcagtcgttggaggaccttttaagagcatgtgtcttatagcagaagggaagctgggagaattttcttccattgatagagttcacttataataacagttttcactctaccattggcatggctccctatgaagctttgaatggtagaaggtgtacgacacccctatgttggttagagcccgcagaaggcctcattntagtgatgtgccatcattttcttctattttctaaaccctttttacaccactttaattactgattggtcttaattgtcaattaattaggcagttttattatttggtctcatntcagctaattgatgttctaatctaatttcacgaattaatgaaacatt

SEQ ID NO: 14354 - DNA, 254 bp, Glycine max
aatgagtttatgagcaacttaggattcaaaagatgtgacatggaccattgctactatgttgagaaatatactaatagttatgttatccttgtcgtgtatgttgatgacatgttgattacaggatctagtatgatagaaattaatagtttgaagcaatatgtggcagaaaactatgaaatgaaggatcttggtccacctatacaaatccttggtatgagaattcttagaaacagatcacaatgaattttgaagtt

SEQ ID NO: 14355 - DNA, 341 bp, Glycine max
  unsure at all n locations
agctntcaacgtattagacagggcaatatactttcttcacagagctgggcaatgtactaagtgtactttgttaaactatttaagtagagttgtaaacgtttgattgctagctgaaaagtttatttagctattcgataaataaatttttagtaacttttaatatttttacacaccattngaagcaatattatctagaatattaatatttaaaatctaactgtctatattgatatatctttattatcaatatatttattcatatgctttgatatctctttaaaaaaaatcatgatatcatttcttgtatcattgcataaatcttaactatcttaataattaat

SEQ ID NO: 14356 - DNA, 379 bp, Glycine max
  unsure at all n locations
tgcagctgcagcttacaacagattttgtttgaccctctttcctacaattaaaataactctttttcctctcaagtgtttccctctctttctcactctcaagtgttgtgctcaccttttctttatctcttttctcttgaagaagattctctctcattttcttttgatcctcacacacttctagtggactcaatggcttgagcacaatctctttgtcttgctgcatgaaagagatcttgttggtgtaaccgtcatgattgactcttttatcaaatggccatggtctccccaaaagtaagtgactggcctcataggaacaacatcacanagtaccttatcattgtattcccaatggaaacgtccacttacactgctgcctcac

SEQ ID NO: 14357 - DNA, 351 bp, Glycine max
  unsure at all n locations
agcttcatgggttccctcttatcatagtttcttacagggatcctctnttcattagccatttttggcaggatatatttcgattaagcggcactgtcctacgcatgagctcagcttaccatccgcagactgatggccaaactgaggtgctcaatcgcgtgattgagcagtacctgcgtgcgtttgtccacggcagaccaaagaattggggaagattcatcccttgngtagagtggtcgcataactcgtcctggtctgtgtggtccgggtctacaccgtatgagattacatatggacgganaccttttacattttctgactacctcttgngcacatcgagacttgacgcggtgg

SEQ ID NO: 14358 - DNA, 467 bp, Glycine max
  unsure at all n locations
ataaacttcagatttcagagctcttttagagcacannaattggtgctcttctcttcctctcccttcattcatctccttcttcctccaagttcttatccatggcctcctatggtggtgagcttcttctagactcatcttttccttgaagtggcatctcctctctctcttccttctcgatttctatgccattcatattccaagaagcaaaggaatccattgatgaagaagatcctaggcctacaagctccaatggagcttacatcatgtggtatcaagagcatcttcatctaggtgatgctcttttgcttcctctatctttttgttcggtgaattatctttaattccttgctcttcatcttattctccatgtatatcctccattgtcttgtggtttggtgctatttagagtaaattataaaaaataaaccgattaaatcttagatctacacttgttctngcatttctat

SEQ ID NO: 14359 - DNA, 393 bp, Glycine max
tcagcttctgacctgaataacacatcctcaatcacttcatatggttttgtgacagagcgatcaaccaactggagggtcatgcatgtgggcattatctctatctctccaagtcgtcgacacatggagagaggcattaaattgatactagctcccaagtctatgagagctttacccacaacaacctcaccaatagaacacgatatactgacacttccaggatctttgtgcttcgggggaaggatgcgttgaatgaccacactatagttaccttccacaactattgtgtcactgtggatataccggttattctttgtcagcatgtcttttaaaaatttggcatagagtggcatctgttggagagcttctccaaaaggcaaagtgatcttcatcttc

SEQ ID NO: 14360 - DNA, 316 bp, Glycine max
  unsure at all n locations
tcttgtcctgaatcaacacatcctcaatcacttcatatggtcttgtgacagagcgatcaaccaactggagggtcatgcatgtgggcattatctctatctctccaagtcgccgacacatggagagaggcattaaattgatactagctcccaagtctatgagagctttacccacaacaacctcaccaatagaacacgatatactgacacattcaggatctttgtgcttcnggggaaggatgcgatgaatgaccacactatagataccttccacaactattgtgtcactgcggatataccggttattctgtgtcaacat

SEQ ID NO: 14361 - DNA, 267 bp, Glycine max
tgactgctggagtcgctgcactagatgtccaacgttatgctaacgaatagatcgggctgcacacatgcacaaggcatagatacagtgtcatgtgaagaattgatgctgcacgattcacgatgtcggataccctgtggaggacatcatgccccaaatactggacatataaatcgtgtgtatttgtaacagatcattgcgcaattagcaccagattagatgatctatctgtacgaacgaattacatgatagttgacgtgtgaagtacaa

SEQ ID NO: 14362 - DNA, 381 bp, Glycine max
  unsure at all n locations
ctctcgtacttaagaggtattttatatagtcattgaaaattgtgatgttggtnttatggaacaacaatctaattaggagatagagaaaaagatatagaccattaactgcagttattctaaaaaaaatacctctatagtgatcgggattgtagttgttctaaaattaagtattattctatattgatactttagatgttaaatattaatttaaaaatataaaatgtttaaaaattctacattattgttctataattgttagaagataaaactaatttatttaaataaatttcacagtcaaattttcttgaaatgttcctcgatatataaatgtctaataaataaaccaaatacaacaatcaactgcagagaaccccaacaatg

SEQ ID NO: 14363 - DNA, 424 bp, Glycine max
tctccacttgtaactggggcctaaattatatagcatggtttacacttgttgaagagcttccttggccttctttgttctagccctggccataggtcctccaagtccttataaaggttccttgtcttgtcctcatcactctccccctcttcaaaaggatttgtcctcaaatcggcttctccatatacatcaaaaagagttaagtcagacacactaaatattgtactcacattatactcaccgggcaattcaatcttgtacgcattgccatttatcctttcaagtacttgaaatggaccatcccctcttggttgaagcttggattacctttgctccggaaacctctcctttctcatgtgaacccaaaaccaatctttgggttggaaaacaaccattttgcgccccttgttgcatgttagcatactct

SEQ ID NO: 14364 - DNA, 372 bp, Glycine max
ttcttctttatatcatcaattcttcatgatctacaagaaggtccacctgcatgaaattttctgctaggaagctctctcttttgtgcgactatgtcatcctctttctcacgtgtagaagcaagcttgacaggttcaggtgcaggtgctgctactagtggaggcacttgaatctggttggcagaccttaaggtgatggcactcacattctttggattctgcatagcttgtgaaggcaattcgtcagaatattgggactgagcttgattcaactgagtagccatctgccccatctgatatgtcacactctaaatggaagctcttgtctcttgctgaaattgcatattctggatggtcatatgcctcactaactct

SEQ ID NO: 14365 - DNA, 379 bp, Glycine max
tgcaagctgatgattacatctccccctttctattcttattcttcttgatatcatcaaaatcttcatgatcccgactcgttggtggaggatgcatgaatgacaatcaattcatggggctccgaataaaagtggagaatggaggataggcgaagagcgctacgcaatcaattcgcgggtctcccgactcggtggtggaggatgaatgagtgacattcatctcatggggctccgaataatagtggagaatgcacgataagagaatatcgctaaagcgtcaattcgcggggctgcatactcgactgtgggaagaagcaaaaatgacaatgatctcatatggctactaataaaagtggtcaatggagaataggcgaggagcgct

SEQ ID NO: 14366 - DNA, 487 bp, Glycine max
  unsure at all n locations
ttctcggtgggttgatgcactctatcatgtaaaatagcatattgattgttatacatattttcaatcaactcagtntcctcctcaggggtcttcagctttatctttcctcttgctgaagcatctaacaactgtttggtttgtggtctcagcccatctataaacatgttcaattgaattggctcagaggatccatgtgtgggagtctttctcaacataccctagaacctctccaatgcttcactcaaggattcatcagggaactggtgaaatgatgaaatagcagctctcccttctgcagtctttgactcggggaagtatctcttcataaatttataaccaacttcctcccacgtcttcagactgttacctttgaatgaatagagccatttctttgcttctcctgccaaagaaaatgagaatacattgagcctaatggcttcatctggcattactgctatcttcacagtgttacaaatttctatgtaca

SEQ ID NO: 14367 - DNA, 449 bp, Glycine max
  unsure at all n locations
agctntatcgtcaccaaagattggtattttattcttcatttacaaaagtcttgttatgctctttcaagaccctattcttcgatatttttgggttactttccttgactaaagcttcgtgacgaactatgtacgacataacttcattactgttattcagtatatacaaatgagcttgttgcaattcttctagacttggagtgataacagatagtccccttgaacccttacctctcactctctcgttatgccaagacttcggaaccccaataggtattttcttttccatgtactcggaacaaaactcaatagcttcttccgcaatgtacctttcaacaatagatgcttcaagacagtgtagattctttgtgtatccttttaagatcttcatgtatcgttcaactaggtacatccatcgcaaataaacacgaccacaacatttaatttccctc

SEQ ID NO: 14368 - DNA, 333 bp, Glycine max
  unsure at all n locations
cttgagccaattcanacgacaantaacttttactcggacgtctgatttagtcccgccatatatcgagacgctcgaaattgaatgttgaagctctgagccaattcaagcgacaatatccttttactcggatgtctgactgagctccgtaatataacgagacgctcgaaattgattgtcgaacctctgtacaaattcaaacgacaataactttttgctgggatgtctgattgagtcctgtcatatctcgagacgctcgaaattgtatgttgaagctctgtaccaattcaaacaacactaacttgctactcggatgtcagattgagatccgtcata

SEQ ID NO: 14369 - DNA, 367 bp, Glycine max
agcttcccaagttttaagttattcctcttttctgtcctaagcaaagttccaaaagtcctattaacaacttccgtttgcccatcggtttgtgggtgacaagtggttgaaaataacaatttagtgcccaacttgctccacaaagtcctccaaaaatgcaaatcatcaagcctaggtataggatgcctatatttaatggtgatgttattaagggctctacaatcagaacacatgcgccatgtcccatcctttttagggaccaaaatcactgggacagcacaaggactcatactatctcttacccaacctttgctaatgagttcatccacttgtctttgaatctctttggtttcttgtgaattacttctat

SEQ ID NO: 14370 - DNA, 415 bp, Glycine max
gaactacaatggaaccaccattatatttcgccaagaacacacatcctgagtggaaccaggttttcgccttctcgaaggaccggcttcaggcctctatgctggaggttaatgtgatagataaggatgttctgaaggatgacctcatcggccgggtgtggtttgacctgaatgagatcccgaaaagggtacctccggatagccctctggctcctcagtggtatagattggaggataggaatagcgacaaagcgaagggggagctgatgctggctgtttggatgggtacacaggctgatgatgcttttcccgaagcttggcactctgatgctgcgatggttagtgggagtgatgctcttgcgaacattagatcgaaagtttatctgtctcccacgctttggtatttgaggggtaatgt

SEQ ID NO: 14371 - DNA, 447 bp, Glycine max
  unsure at all n locations
agcttcataaggttatatatggcctcatataagctcctaaggcttggtttgataaactaaatgagactctactaatgtttgaattcaaatccaacaagtttgatccttcactatttgtttattttaaggcttcatccataatctacattccggtatatgttgatgacatcataaaaacatgaaatgatattcctttattacatcaactcatttctaagctaaatatagtattttctctcaaagatcttggatcctcagattatttcttgggaatgaaagtaaagcatctatctgatggttccattgctttaacttacaccaaatatattagagacttaatgggcaaaaccaacatgttagatgtcaaacctatatcttccncaatggtaactggctataagctcaactagaagtggtctaatccctttgttttatccctatatgtat

SEQ ID NO: 14372 - DNA, 377 bp, Glycine max
  unsure at all n locations
agctntgttagctctagaggtattactttataaattccattaacatttatgttaactaacaataagaataattatccttgatccattcaactaaccatgtgcaacaaagtaaataactacattacggcataatacaaagaaattattatgaatttatttattaacaaatgttcacaatatctctcaaacatatgcaactatactacttgttaaataaaaattatatcagtcctctatttgatttacatatactatagagacaagaatcatggtcaacaatttttttccagcattataaacaatcaaaggtatgttcaatcaataattaaatcatagtcaacaacacatgacaagctttgcacaatagaaaacactac

SEQ ID NO: 14373 - DNA, 404 bp, Glycine max
agcttgtctctcagatagtacaatcttgctctcctgaccttacggtggcttaccactctgatttctttgatgtttggtgagtaactgtaacagtaaatataagcatcatataagaaaactagctcacaagaaaaatctggtaaagactacatatgaaaaattagcttggccttaaacatcaattggtaatttaataaagtgaactgctgggtaatttcttgaataaataaattcagatcttcaaaatgataatttcataaacttttactatacaacatatagacttaagacaaacattgagcataaaactatagaagcatggcaaatgttcatctgcaaccaacaggaatgtaggtcacacattgaaacagatatgtttatctcaatctcatactccattcttc

SEQ ID NO: 14374 - DNA, 371 bp, Glycine max
  unsure at all n locations
agctngcatccnncattttccttattccttcaagctataacaataaaagtattatcaataccatcaaattaaaccaataattaattaaaatggtcacattaattatatgtcatgccatgttgtcaacaatactgcctgataattaaaatcaaaataaatacaaaactcatggtttttaactattagtatgattatgacggttagaaataatctaagttctacatcgattaaaaataatttcaaattagaatatataagtgagggaaaccctcactccttgaactaacttttgaaattgagttagacttttcacattatttattctaagaatatattagagtatattatcatatcttctaaccatgactatt

SEQ ID NO: 14375 - DNA, 414 bp, Glycine max
agcttcagtaaataggcattactcatatactctttcaggacaatatcgcgattcaggtgcagcatacactggtaaatttacaagttcaggaatctttgggtctctcaaacgaagatgaggaggttgatcatgttcatgatttgtgttgctcctgcgatggaactaaatataaatgcctatcgagaaagaaaatgaactgcaaactatatctgttgacaaaatagtcagtaatttctgtcattatttatcaaaaccataaacagagaggctgacacaaattattactacataaatcagtgaacattggctgtatttttcattcacaataaatcggcataaatcaaactgcattcttatataatataagcgtggttcttacacagcgaaatttttcatattgcacattgagtttac

SEQ ID NO: 14376 - DNA, 441 bp, Glycine max
  unsure at all n locations
agcttatattaactcttcttctagatgttattgttacgccaaacactcaaaatggaaatgctcttttgcacccaacatttaacttcctccattacatgccgtagataaatataacaaaattcaatcttagtcttactcacttatcacatgacataataaaatattggagcatatattcgactacctaacaagttgcctattttatatgatagtattgtttttctaccaatagaaaagatctacgtattatgttaagtaatttcaaattatgtcttatttataattaaaaaaatttatttcttgtctctatcaaaataattgaacttaaatcttaattgaaacataagtaagtgataataaacagtataaaactgtgtgtctttgaaaagtctctaanattaaatcattaaagtaacatgtgtatgagttggctttataccg

SEQ ID NO: 14377 - DNA, 426 bp, Glycine max
  unsure at all n locations
agctngtactcgaagccctctntctattgttgaggctccacaccgccagcggatactagctgctgagtctgcttccttcaatcgactttttgtggagcgggcatacaagtatcgccctgttaatgtggtggaatttgaacttccgcggcagcagtgtgtggtttacttggatctgaagcgggaggagtgcaccaatttgttcccatctggccgagtatattcacaggcattccatttacgtggacaagggtttttcttatcagcacattgcaacatggaccaacagagctctttccattgctttggcctgttcttaggaatgcaggaaaagggctcagttagctatgccgctgactatgagnttgctgctaggtcaacgccaacagaggaatttgttatcaagcacaaaggcaattatgtattcac

SEQ ID NO: 14378 - DNA, 246 bp, Glycine max
  unsure at all n locations
agctntcactcgcatgtccgattcaggcgttttctgttcgagacgctaganatctaacaaaggaagctctcgagaaattcaaatggtcataacttttcactcgcatgtgcgattcaagcgcataacatatcgagacgctcgaaattgaacaacgggatttttcgagaaattcagatggtcgtaacttttcactcgcatgtgctattcagcacattgagtattgagacccttgaaattggaccaagg

SEQ ID NO: 14379 - DNA, 444 bp, Glycine max
atcctctgagtcacctgccgcatgcaagcttcaagaattatggcctcatcaaactacttgtttcctgagggaaattctataaatagacctcccatctttaatggagtgggttatcactactggaaaccccgcatgcaaatctttataaaggcaatagatttaaatatttaggaagccatagaacaaggaccttatgttccccatataatagccggaagtgcaacaatagaaaaacctatagcagattggactgaggaagaaagaagattagtacaatataatttaaaggccaaaaatattattacatctgccttaggaatagatgaatactttagggtttcaaattgtaaaagtgctaaggatatgtgggatacactacaagtaacacatgaaggcacaacagatgttaaaagatctacgataaacactctaactcgtgaatat

SEQ ID NO: 14380 - DNA, 470 bp, Glycine max
  unsure at all n locations
agaggaatagctgtgacgaagaagagggacttgtatcttatttatagaccaactcatagnttggattgatgaatataaccttcatttttacttcgtaacttatacgaatttaagtataataatatcacatgaatccaagacaaaaaataagaactttctggagacttacaccttccaaatctcaaatataaacaaatgaataaatttcatatattaaaatcttatttaataagatgatcttaaaaataattttcatttaataagatcaattgttttatatttaatatcaagcttaaataaaaattaattaaaacattataaataactcaatttaataaaattaactaatttctttaataaatataaataatggtgttttataatcgagatgtagctaatatcttaaaaaacatatgagactcatttgagtttctcataatgtttggataagaattaattaatatgacaat

SEQ ID NO: 14381 - DNA, 394 bp, Glycine max
actcaagcttcttagtttcagatgatgcagctgcattcgtatcttccttatgcactcctctaatgactatagcatcatttctggcgctaaactgctgtgagttggaagccatcttctcaattaaatttctggcttcagcaggagtcatgtctgcaagggctccaccactggtagcatctatcatacttctctccatattactgagacctttctaaaagtattggagaagaagctgctctaaaatctgatggtgagggcaactggcacatatgtttttaaatctcttccagtactcatacaggctctctccactgagttgtctaatacctgagatatccttcttgatggctgtggtcctagaagcagggaaatattttctaagaatactctctta

SEQ ID NO: 14382 - DNA, 471 bp, Glycine max
  unsure at all n locations
gcgcacaagataaaaaggtatgggtatatacctctctatagttngaactccttagatggatgcccattcaccaagactgagaatgtaattgtagagacacacctcanaatcaaatccacctaatgagttgggatacccaattgttctagaactctcctcaagatgatccattctaccctgccataggctntagacatgtataacttgaaagccattgaacatttcctccccatgatctttttcttcatataataaaagcactcaaatgccaccaaagcattattagtaatcaatctatcaggcacaaaagcgttctatgtttctcgcccaatatgtggaaggatgatcttcaatttatttgccatagtcttagtcaccaattagaagaccacattacatagactaattgacatcaactcactagcatgtgtgagaattttcacctttggaatcaagggaatccaagtctta

SEQ ID NO: 14383 - DNA, 477 bp, Glycine max
  unsure at all n locations
agcttatcctgatgccaagaaccagccacatgttcttgttagtccaagctatttccattntgttgcttgaaatagtctgatctatgtttccttttgctgtgatctactcgatcctgaggatgtttttcttgatcaataggtggcacaaagattgaagcaacaaggctactcttctggttgctctgttggtgatacaatcccttatantaattgctatgagcaggtttgtcatttagtcactctcccaatcaaaggccaaatagtgcaactntgggaaattntttgcatcgagtatttggtgtatatgtntgtctcaattgtatttttaatattatgttctgctntgattagggtggtagtccaggcagtgcagctggcattgctcaacgtgccagacatcctgatgaacttaaacgagatcaagggacctggctgatngacattgattactatntatcacaacaggtctttatattt

SEQ ID NO: 14384 - DNA, 245 bp, Glycine max
  unsure at all n locations
tgtcgagagcttccgttgctcaatttcgagtatctctatatgtgatgcacctgcatcggacctcctagtgaanaattatgaccatttgaatttctcgagagctttcgttgttcaatttcgagcatctctatatgtgatgcacctgcatcagacctccgagtgaaaagttatgagcaattgaatctctcaagatcttccaatgttcaatttcaagcatctcgatatattatgcgcctgaatcggac

SEQ ID NO: 14385 - DNA, 309 bp, Glycine max
  unsure at all n locations
agcttgatatagtctgggtctgtcacttcccgctcctacgtacagtcctcaagcaacccacttgagattgtccactctctgtgtaaaactccttttacaaagtctgaaccacacacggacgacccttgccttgcgttcgagaatcctctacaacaagagactctcagtctcttaatgccttttgagaagtaagaagatgagaagaagacctctctcttatnagggatagattgtcaatgaagaccaatcanaattccttattgaatgtgcaagtggttgaccaaggaatcttattgagaggataagaca

SEQ ID NO: 14386 - DNA, 322 bp, Glycine max
  unsure at all n locations
tatgctgcanatatntacaatagacctcctcaacctcagcatcaaaatcaaccgcagcagaacaattatgacctctccagcaacaaatacaaccctggatggaggaatcaccctaacctcagatggtccagccctcagcaacaaccacagcagcctgctccttccttccaaaatgctgctagcccaagcagaccatacattcctccaccaatcgaacaacagcaacaaccccagaaacagccaacagttgaggcccctccacaaccttcccttgaagaacttgtgaggaaaatgactatgcagaacatgcagtttcagcaag

SEQ ID NO: 14387 - DNA, 362 bp, Glycine max
atctggaaactgatgagatgaagaaattctattcttgtcttatgccgccttggatgtcggaaagtatttctgcaagaatttctccataacctcttcccattttcttaggctatttcccttgaacaagtgaagccatctattaacttcactggcaagggaaaaggagaatatgttgaggcgaatagcaccttcacgaacaccaactatcttgactgtattacatatctctatgtaagtggccaagtgggtgtaaggatctttatatggcaatccttataataggtagctctgtattatctatattagagaatgtgggtaacagaatgttgcaacattgtacctctagccacacaatacttgtg

SEQ ID NO: 14388 - DNA, 374 bp, Glycine max
cgcttcatctcggtctactaactcggcagccttttctgcaccttagtatctccttgcgtaggaagaattatggcgggaggatctctaccgtaaactacctgaacaggtgtaattccgatacatacatggtaggaagtattataccataattcagcccaagacacccaatacgaccagtttttgggctgctcctatgcgaaacaacgcacataagcctcatgagatctatgcaccacgttggtttgaccatccatttccgggtgaaaagaggaactcatcttcaaggttgctccttgtagccgagatagctccttgcaaaacatactaatatataggatctaggacactagcaatggagtgtggcactccatgta

SEQ ID NO: 14389 - DNA, 298 bp, Glycine max
aacataagcacttatactatttatgaaagctggagttgctgcacatgatgtccaacgttatgtcaaagaataagatcgggctgcacaatgcacaaggcaagataaagtgtcaaatgaagaattgaagctgcaggattcacgatgtcggatacaatgtccaggacatcctgcctgaaaatactggaattgctaatagcattgaagctgcaggatccacgatgtcggatacaatgtccaggacatcctgcccgaaaatactggagttgctaaaagcattgaagttgcaggatccacgatg

SEQ ID NO: 14390 - DNA, 244 bp, Glycine max
gatgcatgggagatcctgaaaatcactcatgaaggaacctccatagtgaatatgtccagattgcaactgttggccacaaaattcgaaaatctgaagatgaacgaggaagaatgcattcatgacttccacatgaacattcttgaaattgccaatgcttgcactgccttgtgagagaagatgacagatgaaaagctggtgagaaagatcctcagatccttgcctaagagatttacatgaaagtact

SEQ ID NO: 14391 - DNA, 484 bp, Glycine max
  unsure at all n locations
catgcaagcttcatctcggtctactaactcggcagccataacttcaactcttgtttcttcttgtgtaaaatgaattatggtgggaggttntctaccgtaaactacctcanaaggtgtagttccaatagatacatggtaggaagtattataccataattcagcccaagacacccaatacgaccagtttttgggctgctccgatgcaaaacaacgcanataagcctcaagacatctattcaccacttcggtttgaccatccatttccgggtgaaaagaggaactcatcttcaaagttgttccttgtagccgaaatagctccttccaaaacatactanaatagaggatctaggtcactaacaatggattgtggcactccatgtaaccagacaatctctntggtaaacacctcggctattttcttggctgtataagggtgctngaggggtatgaagtgtccatactttgataatctgtccacaacaac

SEQ ID NO: 14392 - DNA, 279 bp, Glycine max
atctccttcttcactacatcaataatcaccttgtttatgtcttctctgggctgtcttactggtttagctccatcttctaaatatattcgatgcatacatgtggatgggctaataccacgaatgtccgccagggtccagcctatagccttcttatgcttcttgagaactgacaacaacttcttctcttgctcaatcagcaggggaggcagatataatcactggagaactcttgctatcatccaagtaagcgtattttaaatttgatggcagaagcttcaa

SEQ ID NO: 14393 - DNA, 348 bp, Glycine max
  unsure at all n locations
agcttcagaaagaaaatttggcactacagactgataanagagttgtaaggagcttgtatganaattcctatgaaaagcactgggaaattgaagaccagattacacaaatgcagaanagggtttgcagcttgcaagatgagtttggaattaatacattcatagaagataacgatgcacgagctctgatggctgcaacagctctgaagtcatgcaaagagaccctggctaagttgcaagaggcacaggcacaatcatctgaagaggctaaagaatcataccaaatggttaaggaagctcacagcaagtttgaaacccttagagacctattcattntctaacataagagtc

SEQ ID NO: 14394 - DNA, 255 bp, Glycine max
gctggagatggcccactctatctgagagactcctgttacacagactgaaccagactgggacaccccttccctggtgtacaataatcctatacaccaagatggctgtgagactctcagtcccttgccagaagcttgcatatgagatgaagatttctctcttaattgggattgatggaacattgaagaccagatcaaaagtccttattgaatgcgcaagtgcgagagcaatgtgtctttgtgagaggataagacatt

SEQ ID NO: 14395 - DNA, 351 bp, Glycine max
  unsure at all n locations
ttggagtttccagtgccaattcgtcttcttctttagtcctgtcttcttctggcttcaatccatcagtgggctttccttctgagtccagcatcttgggatgttcccagcctttgatgacagctttccaggttctgctatccagtgatttgaggaaagccaccatccttgctttccagtattcatagttggntccatccagaattggtggtctgttcactggtcctccttctttctccatgttcatcagaatttatctccctaggtctcactcagtgatttcgagtgcccgctctgataccaattgaaattctgataccaatgccagatgtcgtacaggatgtcacgacatca

SEQ ID NO: 14396 - DNA, 348 bp, Glycine max
  unsure at all n locations
cctcatggactcctctaangacaatagcatcatttcttacactgaattgttgggagttggaagccatcttctcaatcaaattcctagcctcagcaggggtcatatcaccaagagctccaccactggcagcatcaattatactcctctccatgctgctaagtccctcatagaaatattgaagaaggagttgctcagaaatctagtggtgagggcagcttgcacacaatttcttgaatctttcccaatactcatacaatctttctccactaagttgcctgatgcctgaaatgtcttttctgatggcaatggtcctagatgcagggaagaattccncaagaacaccctctt

SEQ ID NO: 14397 - DNA, 315 bp, Glycine max
  unsure at all n locations
tacgccagtcctcattcaacccacttgagattctccactctctgtgtaaaactccttntacaaagtctgaaccacacagggacaacccttcccttgtgttcaagaatcctctacaacaagagactctcagtctcttaatcccttttcagaagtaagaagaagagaagaagaaatctctcttaaaagggatagattgtacaatgaagaccaatcaaaattccttattgaatgtgcaagtggttgaccaaggaatctttntgagaggataagacatttcagttcagatnaactctgggactttcgagaggataaaac

SEQ ID NO: 14398 - DNA, 363 bp, Glycine max
  unsure at all n locations
atgaatcananatctgcacctgttgccagactctgtggtttatgctcctctgccaaccaccacacagacctttgcccttctgtgcaacaatctgaagcaatcgaacagcctgaagcttatgctgcaaacatctacaacagacctcctcaacctcagcagcaaaatcagccacaacagaataattatgacctttccagcaacaggtacaatcccgggtggaggaaccatcccaaccttagatggtcgaatcattcacagcagcagcaacaacaacaacaaccttattttaaaatactgcgggcccaacagacatatgttcctcatcatccacagcaacacagcacaacctagaacagaaacagt

SEQ ID NO: 14399 - DNA, 428 bp, Glycine max
  unsure at all n locations
agctttgcgcacaagatatatttgtatgggtatatacctctctatagtttgaactccttagatggatgcccattcaccaagactgagaatgtaattgtagagacacacctcanaatcaaatccacctaatgagttgggatacccaattgttctagaactctcctcaagatgatccattctaccctgccataggctttagacatgtataacttgaaagccattgaacatttcctccccatgatctttttcttcatataataaaagcactcaaatgccaccaaagcattattagtaatcaatctatcaggcacaaaagcgttctatgtttctcgcccaatatgtggaaggatgatcttcaatttatttgccatagtcttagtcaccaattagaagaccacattacatagactannatgacatcactcact

SEQ ID NO: 14400 - DNA, 456 bp, Glycine max
  unsure at all n locations
gaacaccctcagatagagggagatattgctagtgtaaaagatataatattggtaattaattaaaatntatnataaaaatatgactttaattaaacgttaaaaacatttacaatatcacaagtgtctctctctacctattgaatcatatattaatactnttatcgtacccacatagttgtcactcgtatagctgaattttgcatataaaanaaaattgaacgataatttttactttaaatacatcattttagtacatatgaatgcaatgagannntatagtattatacgaatcctatcatatatgataattataattgaataacaatgtaaatttgtttatatcatcttcttttggttgatgaataattattatatatcaatacataaaatattaccctaattaaataaatactattctgtcacatattatatatatatatataatatattatatta

SEQ ID NO: 14401 - DNA, 368 bp, Glycine max
  unsure at all n locations
gctgggtaatgtgaatgatagtatcaagattgtttgcctgtcatgataatgtcgtcaacatatacgagaataactgtgagatcatgagaatggttagtgtataagaaaagtgagtgatcagcagaggattgatgaaagccttgagaaagaaagaatgacgagagtcgtgtgaacccattgcgactcgcctgggttaggccatataacgaacactgaagacggcagactagattgggatngtccacaattaaacctggaggaagcttcatatatacctcttcgtggaagtccccatgaagaaaggcgttattgacatcgagttgtcgaagatgccagttacggagagcagcgagagcaaggagtaacct

SEQ ID NO: 14402 - DNA, 451 bp, Glycine max
  unsure at all n locations
catgcaacccttaaaacacccattcccctatctcatactgcagatctcttcttttcttgtctgcatactnnatcatctgatgctgagcccgtaacaaatgacttttaagctgattcaaagcttcatccctttcagttaactctaaggctacagcagccactntagtctcattacttaaaaacctcaacaaactgggtggttgtctgccatacactacctcaaaaggtgttttccctatggaaacatggaaagtagtgttataccaatattctgcccacgggatccagtatgaccaagtcttgtgctgctcagatgcaaagcacctcaagtaaccctctaagcatctattcagtacctcagtttgcccatcagtttctgggtgggaggcagaactcatcttcaactcggtaccctgtaactcgaacagttccatccagaaatggcttacaaa

SEQ ID NO: 14403 - DNA, 404 bp, Glycine max
  unsure at all n locations
agctngccaacccatggaagctcctaatatctcccacactntatggggtgggccattcttggatggacttgattttctcagggtccacttggaccccatttctaccaactacaaactctaagaaaactatattatctacacaaaaagtacacttctctatatttgcatagagggtgtttttcctaaggactgaaagaacttgcctgagatgtcctaagtgatcatctacgctcctactgtacactaaaatatcatcaaaatagacaactacaaatccacctatgaaatcccttaagacatgatgcataagcctcataaaggtcttggtgcattagtgagcccaaaaggcatcactagccattcatacaaaccaaacttggtcttgaaagcgggtttccactcat

SEQ ID NO: 14404 - DNA, 477 bp, Glycine max
  unsure at all n locations
gcttgttngacatccaaacttatcttgttagttttatttgatcaaaataaggatgaatttgtttaaacttaanaaaataactntaaaataaatattttttacataagtgtttttttaaaacatagataagatttttttcaacaaataagtgtaaacaaattaatcctaattttgtttggtactcaagtttaatttagtaacttaatttccataagttacttgaagtagcttatgacacacaaattagattataagctactagttnttttcttcttcctcaatttattcttattattttatttgaaattttattntatccttntattcaatntaaaaatcctcttatcttttatgttcattatggngaaaaccctggtatcanattttcatagtcatgtaagtgagagacatacacatctaagttcttaatttacaaataanaaatgaatggttaagaaaaaatataaagaataaaca

SEQ ID NO: 14405 - DNA, 299 bp, Glycine max
atagctggcatatagtaaagaaagatcttattgctgcagcgaatgatattttcgagagaggatctttattagaggattctaatactactcttgagactctcattcctatatctattactgctaagactgtcaaggattacaagcctattgcagtttgctctactttttataaagtgatctaaaattttttgactatgaggctagggatagtgatacaggatattgttcatactagccaagcaacttttgttcccggtcaagtcattcacaatcatattcttcttgcaactgagtagatg

SEQ ID NO: 14406 - DNA, 311 bp, Glycine max
tgctgctgagatgcttttgttcttacaatcattgggatctagagcaatcttttctattaccaattctctatgtaccatctgtaacaattacggacgtataatgctgccacttaacatgtcatctgatgatggaccacattacgtaaatgctaagcagtaccatggaatcattatacgtcggcagtcccatgccaaagctgtacttgatcacaaattgactaaacgctgcaaggcatgattcctcatataggagtatctaatatgtattctcatctttaaactaacaaacaaaatgtggcctcagcctcact

SEQ ID NO: 14407 - DNA, 475 bp, Glycine max
  unsure at all n locations
agcttataagatattatgttcttaattctnttaagccaaaccttngcacactttataagagattctcttaacatataaaggtctattgtaaatcgtttctcttgacttcgtagatcttgacttgaatcaatgatgaatatctctaatcttttggcatcatcaatatcttaatacagcatatgcacttacaaattcaacacaaacttagaacataatgtgataattattatgactaacaatgactctaagacaacatgaatgaagtgatttacacttagaattttgtgttttcttttctaatctatatttngcaagaatattttgactgacaacatgattcaagagtagatctatattatnttgactgaatatctttatgtcttctaatttacaggtttagcacaagactattctgattgaanaatgatagaacctacaatcaacatannaacatgattcaagagtagatctataa

SEQ ID NO: 14408 - DNA, 410 bp, Glycine max
tgtcgtggaaataagcatattttgctcgactgtataccctgtatgatcagcacggcttcgtaatacttgttggagaagggcctggtatgtcgtgtcctgcaaacaagtttgctggaactgctccatgaagagtgtgtggggcacaaataaaagtagaagagaggaagtcggaaccctatacaaggcgtctacgactacattatgggcaccgggtttatattgtatagtgtagtcgtaaccgagaagcttatccatgcagtgctgctgctcaggaagttgaataacctgagacatcaactcctttaagctccggtggtctgtcataatgacaaaggagtgcccgagcagatagtggcgccatttacgtaccgcagtggtgatagcatgtaattcgcggacatatgtggatg

SEQ ID NO: 14409 - DNA, 396 bp, Glycine max
  unsure at all n locations
actatagaaactaagctatctanaagagttcttcatcttcttccagatgcaataatattaatcttcctaggagcttctcacagaagaacccttccattggccgcaaatgcaccaaattagctaaggaacagatagcaaggttttacatcatgaggaggtgtgttgccatgttggtttgctggcacaagcatggggattcatgaaagaagtgcacagatcttgtgcttagttttattggttatgatcctttattgcccactttgaatactatagattcattgtattacgagttactaaggtgagtataagatttacacattgctggaaatatgtatatgatcaattggactccagattaatgtccccctcctacgtctgatgttatctcttacacct

SEQ ID NO: 14410 - DNA, 258 bp, Glycine max
catgcaagcttctattttcaattacgagcgtctcgatatattttgagactatgtcagacatccgagtcaaaagttattgtcggttgacttttcttagagcttgcgttttcaatttcgagcatctcgatatattacagggctcaataggacatccgagttaaaagttattgtcgttggatttttctcagagcctcctgtttcaattacgagcgtctcgatatcctatgggacacaatcggacatccgattcaaaagtta

SEQ ID NO: 14411 - DNA, 356 bp, Glycine max
  unsure at all n locations
agcttccatcactaccgggtcttgaaccgagccagtcctaaagacaattntcccctgccacgcattgatatattggtagataatacaaccaagttcgcccttttcttatttatggatggtttctcggggtataatcaaataaagatggcacccgaacatgtagagaagaccactttcgtcaccctatgggggacgttctgctataaagtgatggccttcgggctgaaaaatgctggggcaacctatcagcgtgtcatggtggcgttgttccatgatatgatgcataaggaaatagaggtctacgtagatgacatgattgccaaggctcgaactgaggatgaacaccttgtcaatct

SEQ ID NO: 14412 - DNA, 438 bp, Glycine max
agcttcactgaattactttttttttgaagaatatgcttcctgtagataacacattacccaagaatcattacaaggcgaagaagatattatgtcctgtgggtatggaatactagaaaatacatacatgccttaatgattgtaatttgtatagaaatcagtttgccaaaatgcgtaactttcctacatgtggggtgtcacactacaaagtgaagtatgacgaatgcagtgatacagcctgatcgaggccgtacctgaatcaaataaacattaaaatgcagtaactatgaagtgatcctaggtcgtttcccaacgagcaatgataaactaaatgttcataacagataataggaaaatagtaacgaattggggggggattgtttgcttttgtaaataaacaacgaatagatgtgaattcaaaaatagcaaaaataaaacacg

SEQ ID NO: 14413 - DNA, 284 bp, Glycine max
  unsure at all n locations
tatatcgatacgctcganataattatcggagactctcggaatattcaaatagtcataactattcacacggatgtccgattcaggcttataatatatcgacacgctcgatattgaacatcggaaactctcgcgaaattcaaatggtcataacttttcacacggatatccgactcaggcacataatatgtcgagacgctcgacattgaacaacggaagctctctagaaattcaaatggtcataacttttcacacggatgtccgattcaggcgaattacatatcgag

SEQ ID NO: 14414 - DNA, 246 bp, Glycine max
  unsure at all n locations
agctatanagactaaagtagttgatctcccactaatatatcttactntnttccttcaacaagactttttgtatactgatgtagctccatgtggagcttgtacgccttgaatcttcttcatcaatgaagtcttttgcttcttgaagatcaatgacgatggaatggagaacgaataaagatgattggagacaccacttccaggagaatatgagtcaagaacangctcaccaccatatgaagtcatgga

SEQ ID NO: 14415 - DNA, 290 bp, Glycine max
  unsure at all n locations
ctctgnagttggggctctacagaatgctactatcacacatncagaaattagtttctttgtcaacaaagtttgccaatttatgagtcagccaacagaacagcattgggtggctgtcaaaagaatcctcatgtatctaaagggcacacttctatttgggctgaaactggaacccaatttttctacaaagcactactttgttcatgccttttgtgatgctgaatgggcttcagatcctgatgatcgaaggtctacctcaagtgttgctgtgttcttaagcccaaatcttgtct

SEQ ID NO: 14416 - DNA, 332 bp, Glycine max
  unsure at all n locations
tctntcattgaagaaatcagtagaacagcaccaattaaatatcttcacaagtatcttgcatccaagggaattgtatcagagacttgccaagaattcaaaagaatgattaccagtctgtggtttgacctttatggccgtggtggcacttctggttcctcttctgcttttgaacatgtttttgttggagaaaccaaacaatggtggtgaagttctggctttcataacatgctgcagctatgacctcgtatttttctttctgcctgtttctaattatccattcacaattcatgccaaatttaaggtgtattaacttgttatattcgaagtcgtat

SEQ ID NO: 14417 - DNA, 250 bp, Glycine max
  unsure at all n locations
tccacttggaccccatttctaccaactacaaaacctaagaaaactatattatctacaccaaaggtacacttctctatatttgcatagagggtatttttcctaaggactgaaagacttgtctgagatgtcctaagtgatcatctangctcctactatacactaaaatatcatcaaaataaacaactacaaatctacctatgaaatcccttaagacatgatgcataagcctcataaaggtgcttggtgcatt

SEQ ID NO: 14418 - DNA, 487 bp, Glycine max
  unsure at all n locations
agctatgaatgcactattcaatggagttgacattaacatcttcagactgatctacactngcacagnggccaaagatgcatgggagatcctgaaaatcactcatgaaggaacctccaaagtgaagatttccagattgcaactcttggctacaaaattcgaaaatctgaagatgaaggaggaagagtgtattcatgacttccacatgaacattcttgagattgccaatgcctgcactgccttgggagagaggataacagatgaaaagctggtgagaaagatcctcagatccttgcctaagagatttgacatgaaagtcactgcaatagaggaggcccaagacattngcaacatgagagtagatgaactcattggttctcttcanacctttgagctaggactctcggatagggctgagaagaagagcaagaatctggctttcgtgtccaatgatgaaggagaagaagatgagtatgaacctgatactgat

SEQ ID NO: 14419 - DNA, 360 bp, Glycine max
  unsure at all n locations
agcttacatgaatagcttctctatctaccattgttntagagttataaactatgtatgccttagatgtttcagagtatccaagaaatgttccatcatcactctatgaataaaattntccaagttatctttagtgttaagaatgaagcatttacacccaaagagatggaagtatgatatgttggattttcgtcccttccataattcataaggagtcttcttcattatgtgtcttatgtaaattttggtttgaaataataggttgtattcattgcttcaacccataaatggttaggagtagcattgtcattaagcatggttcttgccatttcttgtaacgtcatgttctttctctcaactaaa

SEQ ID NO: 14420 - DNA, 325 bp, Glycine max
agcttcaattctgaatctctagcgtctcaatatactatggacacaatcggacatccgagtaaaaagttattgtcattagatttttctcagagcttctattctgaatatcgaacgtctcgatatacaacgggtgacaatcggacagctgagtaaaatgttattgtcgattgattttgcctaaagcttcaattctgaatttcgagcgtctcgatatcctatgggacacaatcggacatccgagtaaaaagttattgttgtttgaatctgcttagagcttctgttctcaatttcgagcgtctcgatatattacgagagtcaatcagac

SEQ ID NO: 14421 - DNA, 481 bp, Glycine max
  unsure at all n locations
agcttgtagaacggatggacatgatatatgttatggtgttgggctggttcaaggataaaagggaatgtccaccattatttccatgacacaaatgcaataatgatgatttggaaattttatgcagaactagtcatgcatgcacctatgtggacacaaatgtccaccattatttccatgaggtattgtgctacctaaacatatgtatattnttgtgaggtatnttgctatatacatgcgtgtccaaggtatcttgctacctaaacatacatatatatgttttgtgagatattnttgctatatacatgcatatccaaggtatcttgctacctgaacatacacatatatantttgtgaggtatctttgctacatacatgcatatccaaggtatctttctacctaaacatacatatatatatcntgtgaagtattttttngttacatacatgcatatctaanggtatttcactacctaaacataca

SEQ ID NO: 14422 - DNA, 465 bp, Glycine max
  unsure at all n locations
ttctctacaattgcatcacctctcaatgagctggtgaagaagaatgtggcatttacctgtgatgaaaaacaagagcaagcctctgtttgatcttctcgaaggcctcttggcagccactgttccacaggaccgcctagttcttacgtaatagcttaaaaatgggttcacatgtaggggtgagttgcgagataaatctcgcgatataattcaacctgcccaaaaatacccgaacctgcttctccgtgcgtggttctagcatttcaaggatggccttcactntctcgggatctatctctatccctttctgacttacgataaatcctagcagcttccccgacctcaccccanaggtgcatttggttgcgtttagttttaattggtatttccgcaaccttccaaacagcttacgcagattgacaaggtgttcgtcctcagtccgagacttggaaatcatgtcatctacgt

SEQ ID NO: 14423 - DNA, 433 bp, Glycine max
  unsure at all n locations
ctacttcacatggacttgatggggcctatgcaagttgaaagccttggaggaaagaggtatgcctatgttgttgtggatgatttctccagatttacctgcgtcaactntatcagagagaaatcagacaccttcgaagtattcaaggagttgagtctaagacttcaaagagaaaaagactgtgtcatcaagagaatcaggagtgaccatggcagagagtttgaaaacagcaagtttactgaattctgcacatctgaaggcatcactcatgagttctctgcagccattacaccacaacaaaatggcatagttgaaaggaaaaacaggactttgcagagggctgtanggtcatgcttcatgccanagaacttnncctatatctcntggctgaagccatgaacacagcatgctacatccacaacagagtcacacttag

SEQ ID NO: 14424 - DNA, 356 bp, Glycine max
  unsure at all n locations
cgtaatatatcgagacgctcgaaattgaatgttgaagctcgtagccaattcaaacgacaatatctttttactcggatgtctgattgacgcccgtaatatatcgagacgctcgacattgaatgttgaacctctgaacgaattcaaacgacaataactntttactcggatgtctgatagaggctcgtcatatatcgagacgctcgaacatgaatgttgatgctctgagctaattcaaacgacaataactttttactcggatgtctgattgagtcccgtcatatatcgagacgctcgaaattgaatgttgaagctctgagccaattcacacgacacataacttttactcggatgtctga

SEQ ID NO: 14425 - DNA, 365 bp, Glycine max
  unsure at all n locations
tatcaacatcaaacttggagaaagagttcttggtgtcaagacatgagaagcaatcaagtataatgttacttccttcactaaagcggggatccatctccacacatattttatcaatagcaacataaaaaatctctgcacgggaatgatgaagattagtgatagtcctcccttctgctcttgaacgaccccgaactggtatttcgtcatccatatttggtaccagaatacttttagcaacacaaaatccttggacatcggcaaaaaaattattccagccactctctctcattgtgcccaaccgagctntgacaacatcaactaattccatgacattcacaatattaagatcttttctttgcaatata

SEQ ID NO: 14426 - DNA, 283 bp, Glycine max
agatgagaaacaataaagtgtggtgtttcggacctctatcatttactaacaaggatcatttggataaggctgaaaagagtaaaaggcttcaattgacttgttccacctcaagtgttggattgattgtcaaaagcccaggactataatatatgcatgccttggaagcatatgtaatttaacacaagaacagttgatagaacttggtttagccttggaagcataaataaaaaacccttcatttgggttatcagggaagaaaatcagttagaagccctggagaaat

SEQ ID NO: 14427 - DNA, 434 bp, Glycine max
  unsure at all n locations
ctatgctgcanacatttataatagaaccccttcagtactcattccaacaacagtagaataattatgatctttcaagcaacagatgcaatccaggttggaggaatcatccaaatctgagatggacaagtcccccacaacaacaacagcctgtcccttccttccagaatgctgctggtctaagcaagccatacattcctcctccaatgcaacaacaacaacagcaacaaaaaagacaacaagcaactaaggctcatcctcaaccttccttagaatagttagtgaggcagatgaccatccaaaacatgcaatttcagcaagagacaagagcctccattcagagtttggcaaatcagatggggcagatggctactcagttgaaccaagctcagtcacaaaattctgacaaattgccttcacaaacagtgcagaatctg

SEQ ID NO: 14428 - DNA, 166 bp, Glycine max
ccttagatttgaatcatagtgatgtatggggtccagccccaatcttgtctccatctaatttcaagtactacgttcactttattgatgatttcatcagattcacttggatttttcccttgaaacaaaaatcagaaacaataacggcttttattcaattcaaaaacat

SEQ ID NO: 14429 - DNA, 439 bp, Glycine max
  unsure at all n locations
caatacgagcgtctcgatgtactacgcgactctttctaacatccgagtaaaaatttattgtcgtttgaatntgctcagagcttctgttttcaatttcgagcttctcgatattttacgggactcaattgggtattggagttaaaagttattggttgttgcatttgctacgagcttctattttcaatttcgagcgtctcgatatactttaggactcaatcggacatcgagtaaaaagttattatggtttgaatttccaacgagcttccgtgttgaattacgagggtctcgatatatcatgggaatcaatcggacattcgagttaaaatttattggtgtttgaattttctacgagcttccgttttcaattacgagcgtctcgatatactacgggacttaatcggacatactgaggaaaatgtattaccgtttgaatttccac

SEQ ID NO: 14430 - DNA, 323 bp, Glycine max
  unsure at all n locations
tcttgaagctggaatgatatatgccatctctgaaagttcatggtttatccttgtgcaagtagaccccaaaaaaggttgaataacagtgataaaaaaaatgacaacaattagttgattcctacaaggatcatggccagccggagaatgtgtattgattacctccttcttaacaatgcaacaaggaaatagcactttcctcttcccttcatggatcaaatgcttgagaggttagccagtcaagccttctattgctatctatatggatactcggggtataatcaaattcttgttaagttaggggatctagagaaanaacacttcac

SEQ ID NO: 14431 - DNA, 487 bp, Glycine max
  unsure at all n locations
ngccatttagtaatgaaatcgaatgaatatagtaacttacttattcccaagaactgcatgtaaattgatgatgagttgctcttcttcctcagagaattttcctcttttgatatcaggcctcaaatagttagtccatcttagcctgcaactcttcccacacctgttcaaccctgcatgttttggaagtgctctccaactcccatgcccatgtttctgaatataatccaccaatattctatcctcttctggngtccaaggccccttcttcaaaccattttcatcactgcatggagttctccccatcatcactcactgcataaacatgttagaaattaaatacttctagtataataagaattagttngattcanggtgcagcatgacaacaaaagagggcaaaagaaatcataccttnggattgagtgtatgaagtggagaatgaagatatatatatagacttagaagaatactctgtggaagttgatat

SEQ ID NO: 14432 - DNA, 369 bp, Glycine max
tatatcgagacgctcgaaattgaatggtgaagctctgagccaattcaaacgaccataactttttactcggatggctgattgactctcgtcacacatcgagacgctcgaaattgaatgttgaagctttgagcccattcaaacgacaataactttttactcggacgtctgattgagtcctgtcatatatcgggacactcgaaattgaatgttgatgctgtgagccaattcaaacgacaataactttttactcggatgtcttgatgagtcctatcatatatcgagacgcctcgaaatgaatgttgaatctctgagccaatccaaacgacaataactttttactcggatgtctgattgagtcccgcatatatc

SEQ ID NO: 14433 - DNA, 410 bp, Glycine max
  unsure at all n locations
atttctgatagagtgaattacctcatgtgatgataatattttatccctactatatatgtaggggacaaaaatgcgttgagtanggctgattaatttcaccataaccaatcttaaccttgaagccaacaccttagtaaaagctttgtaggacacattgcatagattgatcagtttcaattgagacaaaacactaacttcatcaaccttaggaatgagagtgatcagaagtttattaagagaattaatgtcagcagggtgcctaaacaaaccttttataagactgcanagaatagaacccaccaacttccattgagtcgggtagaacaaagccttgaaaccatcctctcttggagctntgaaaactctcgtattgagataacattcttcacctccccatcagtgattccact

SEQ ID NO: 14434 - DNA, 302 bp, Glycine max
gaactgcatgtaaattgatgatgagttgctcttcttcctcagagaattttcctcttttgatatcaagcctcaaatagttagtccatcttagcctgcaacttcttccacacctggtcaaccctgcatgttttggaagtgctctccaactcccatgcccatgtttctgaatataatccaccaatattctatcctcttctggggtccaaggccccttcttcaaaccattttcatcactgcatggagttcttcccatcatcactcactgcataaacatgttagaaattaaatacttctagtataat

SEQ ID NO: 14435 - DNA, 263 bp, Glycine max
cctcatcaaaagtaaccttaattccatgcctaataagcacctgctgcgaaaaattctggtaatataagcagcctcaacgcttcacgaatgagcagagttaatgtcatccttcgactcaagcaatggctcctgcgaggtctcgtgaacagagagcaaatcaagctgcgacccatcgcgcttatcgaagaagagcttattccccacacgctgaacgacaatgtcccacgaataaacagacctgtgagcacacatgagagtggaga

SEQ ID NO: 14436 - DNA, 319 bp, Glycine max
taatatttgaagagtatccctgtggaaccttcacccgacgaagacactgacaaaaacttatcttcttctttttggacaaaatatggcaagctgggggcaagtaaattttcttcccatcagacattggatgcaactgtgatcgtatgcccatatcaactagatcttgacgggtattcaagccatccttcgtcttgccttgaatgttaaggagcgtcccaatcacactgtcataaacatttttctcgacatgcataacatcaatacaatgtctaacgtcaagatcagaccaatacggaagatcaaagaaaatggacctctt

SEQ ID NO: 14437 - DNA, 179 bp, Glycine max
ggtcaatttcgagcctctcgacatattatgcacccgaatcggacatctgtgtgaaaagtcatgatcatttgaatttctcgagagattccgatgtttaatttcgagcgtatcgatatattataaccctgaatcggacctcagtgtgaaaaggtatgaccatttgaatttgacgagagctt

SEQ ID NO: 14438 - DNA, 366 bp, Glycine max
  unsure at all n locations
cttacagcagccttttatccctcttccattcccacctagagaaattccaaacaaaaagatggaagaagcggaaaaggagatcttggagaccttcangaaagtagaggtgaacatacctctgctagatgccatcaagcaaattccatgatatgccaagtttctaaaggagttgtgcacccacaaaaggaagctcataggaaatgaaaggattagcatgggcaaaaatgtgtcagcattgataggtaaatatattcctcacattcctgagaaatttaaggacccaggtactttctgtataccttgcattattgggaacaataaatttgagaatgccatgctagatctaggagcatcagttagtggcat

SEQ ID NO: 14439 - DNA, 271 bp, Glycine max
  unsure at all n locations
gtagatatttattttgacttggctcaccttattattttgaccaacaagaaacactcagcttattaaaattgtgcatactaatatttgtggaccttttgatggtagttctttcagaaaggaaggatactttatcactattattgatggttattcacattacggttatgtttacttactgcctgagaattctcagacaatggatgccttnagaaattactagaatgaagtaaaaaggcaattagacagaaatgtggaaattattagatatgat

SEQ ID NO: 14440 - DNA, 359 bp, Glycine max
  unsure at all n locations
acatggatcaatgtaataatggagatatttcggtggaaggaaatatgaaactggatacaggcgatcatgaagcttcagtagatgccacattgttcaagaagctagtgggatgcttgagattcgtctaccatagtagaccagaaatctcatatggatttggtcttgtcagcagattcatgagtaatccaaaacagtctcatttggcagcagcaaaaagaatcttgagatatctaaaaggaacacttaattatggcatattgtgtcctcatcagaaagaanaatgtgagctatacctcgtagcttattctgactcagactggtgangggataaagtggagagaagatctacttctgggtat

SEQ ID NO: 14441 - DNA, 306 bp, Glycine max
  unsure at all n locations
tactcggatgttttattgagtcccgcannatatcgagacgctcgaaattgaataccgaagctctgagccaattcaaacgacaataactttnttactcgggtggctggatgagtgcccgaatatatcgagacgctcggacttgaatgccgaagctctgagcaaattcaaactacaataactttttactcagatgtctgattgagtcccgtagtatatctagacgctcggtattgaatgtgaagctttgtagcaattaaacgacaataactttttactcggatgtctgattgagtcccgtatatatcg

SEQ ID NO: 14442 - DNA, 420 bp, Glycine max
  unsure at all n locations
tcattggtntgagtagtttctatcaaagaaccgatatctttatatngatggatttcttttagtttagtatgatcagtcatctgacataggttggcttcctcttctccttcttcatcagagggggtgttgtccaaacctgatgtaagctccattggagcttgtaggcctaagatcttcttcatcaatggattcctttgttcttggaagatgaatggcagcggaatggaaaacgaagagagagaggagatgccacttcaaggagaagatgagtctacaagaagctcaccaccatangaggtcatggataagagcttggaggaagaaggagatgaatgaacggagaggaagagaatagcccggcttcttgtgctctaaaagagttctgacatctgacagttaatattcanatgatcaaagttg

SEQ ID NO: 14443 - DNA, 315 bp, Glycine max
actgaatgacgactggaaatttgatttctcttgccatgatgcccggcagttggtttgcaccaacaatgcggatatgactggacgtcttcttgccgggtcattggcttttgaaagccgcatccttcactatttaattgtgtgtattctgcttccacggtcttccaaccttgcccaggtttctgaggaagatctaattatcatgtgggcctttcatacagggcgtcaacttgactgggcacacttagtcagatatcgcatgaataaggcattgcgattaaatgctccactaccatatccacagcttgttactctatt

SEQ ID NO: 14444 - DNA, 393 bp, Glycine max
  unsure at all n locations
tgtntaccccatgttgaattttcttacaatagagctgttcatagcaccactaattgttctccttctgaagttgtttatggttttaacccactaactcctcttgatcttttgcctaatgtttctggttttaagcataaagaaggtcaagcaaaggcggactatgtgaagaagcttcatgagagagtcaaagatcaaattgagaggaaaaataaaagctatgctaaacaagccaacaaagggagaaagaaggttgtcttcgaacccggagattgggtttgggtgcacatgagaaaagaaaggtttccggaacaaaggaaatcaaagcttcaaccaaggggagatggaccatttcaagtgcttgaaagaatcaatgacaatgcttacaaagttgag

SEQ ID NO: 14445 - DNA, 438 bp, Glycine max
  unsure at all n locations
gcttacaaagagaatcatcttgatatgacaactttggaagttctcttacaggctaagcttttgaagctntgagattaacctcaagcttgcaagaccaagtttcttatgccataccgagtgatgctttttttactgagaataatcatgacaccttttgactagaaagatcaccaagtttaatcttataaagatttccttgtcttttagcaaagaagagtgaagagttgtccttgttttggatgatacacatatccttgttaaagatgacattatatccactatcacataattgacttatgctcagcagattgtgcttcaaccctttaacaagtagaatgttattaatgagaggatagggagaaatacagatcttatctacaccaattatcagacctttctagatttgaatattacctcttcaccatcagagttaacagt

SEQ ID NO: 14446 - DNA, 343 bp, Glycine max
tcttagtcttgattgatgaagatgaattcgtggctacttcatgcactcctctaatgacaatagcatcacttctagcactaaattgctgggaatttgaagccatcttctcaattaaatttctggcttcagcaagggtcatgtctccaaaggctccaccactggcagaatctatcatacttctctccatgttactgagtccttcataaaaatattggagaagaagctgctctgaaatctggtggtgagggcaactggcacataattttttaaatctctcacagtattcatataggctctctccactgagttgtctaatgcctgaaatatcctttctgatggacgt

SEQ ID NO: 14447 - DNA, 348 bp, Glycine max
tatatgtgatgcgccaaaattggacattcgagtaaatgtatgacctttgaatttctaagaactttcgttgttcaattctgagccgctcgttatgtgaattgtctgaatcggacatccgtgtgaaaagttatgaccatttgtatttctcaagagctttcgatgttcaatttcgagcctctctacatattatgcgcccgaatcggacattcgtgtgaaaagttatgaccatttgaatatctccagagcttccgaggttaatttcagcctctcgcatatattcgcccaatcggacatcctgtgaaaagtttgaccattgaattctcacagctccgttgttaattcgagcgt

SEQ ID NO: 14448 - DNA, 441 bp, Glycine max
  unsure at all n locations
taagaaaaagatggcctcagcanattccttattttcagagtggaattctatcaatagaccttcaatctttaatggagagggttaccactactggtaaacccgaatgcaaatttttatcgaggcaatagatctaaatatctgggaagccattgaaatagggccttatatacccaccacagtagaaagagtttcaatagatggtagttcatcaagtgaaagcataaccatagaaaaacctagagatagatggtctgaagaggatagaaaacgagtacaatacaacctaaaagccaaaaacataataacatctgccctaggaatggatgaatatttcagagtttcaaattgcaagagtgctaaggaaatgtgggacactcttcgattaacacatgaaaggactacagatgtaaaagatctangataatgcactactcatgagta

SEQ ID NO: 14449 - DNA, 437 bp, Glycine max
tgaatcttgcttggtcgggtacatgagcatatgcaatgctcccaaatactctcaagtgatcaactcttggcttcactccactccatgcttcttgtggggttgatttttgacattctttgttggggagcgattggacaaataaacggcacatgcaacatcttctgcccaaaatttctctggcatatttttaaccttcaacatacatctagtcatattaagaatagttctattttttctctccgctaccccattttgttgtggagatctaggaaccgttagagggcgacgaatttcatatttttcacaaaattcattaaattcttttgatgtgaattcgccacctctatcagatcttatagctgtgattacataaccactctccttttcacaagagctttataattttaaaaactacaaatgcctcagattttgcttta

SEQ ID NO: 14450 - DNA, 277 bp, Glycine max
actttattggttttgcactagtattgtggcatagcaaaaagcaaaatagtattgccttatcaactgtagaagcggaatatatttctgttggaagctgttgtgcacaaatcctatggatgaagcaacaactctctgattacgggttaatgcttgatcacattcgtattcgttgtgacaatacgagtgcaatcaacctatccaaaaatactattttgcacttgatcgaggccgtacccgaatcaaataaacattaaaatgcagtaactaggaagtgatc

SEQ ID NO: 14451 - DNA, 388 bp, Glycine max
  unsure at all n locations
tctctctcgncnanancaactaactcatctgacatcattttcaataatggtcgatcggaatgtccatttgtttttgtactctagctgatngcaaatgtatttcgaccggaagtatagcatcgtgcccataagtcagtcgaaatggggtagtattagttgattccttangagaatntctacatgcccatagaacttgatctaacgttttattccaatttcttggcttttgggcaatgtgttttttaatcaagttgattacaatcttattggctgcttcgacttgaccatttgcttgcgcataatatggtgtcgaggttaataatcgaaagccagttttttgggcaaattctttcatttttcgtccagtaaaaactgaaccttgatcagt

SEQ ID NO: 14452 - DNA, 400 bp, Glycine max
tggtgcggagatgatggtacagcgggtgaaccagaagcggaagtttcttttggtgaggtagccatggaaaagcagagcgtttggaatgatttcgtaaatctcataaaactattgggaaatgctggtaaaaacacgaatgccaagcagatataaatttgaatgaagaatgtagaggggcgtgtgaagcaacggtcgaatttgctttgtagtgaacgtgctattaatgttaagtgattcgtttgggcacgttcagattgcagtagctgctataattcctctagcagacaaatgcccagcttgcccctcagtttttcaaactgatttgcatccaaagcctttgtgaaaatatctgctatttgttcctcagtgtccacatgcttcagtgtgatcactttatcat

SEQ ID NO: 14453 - DNA, 271 bp, Glycine max
  unsure at all n locations
aaatgaacaacaacaatcaaagtcaagaatagcanatgaataaaattcaccacaccaattaataaaaaataaaaacacagtaactgcttcaagtgtgcattntgcataccacatagattggttatggcatttgagatagccaaggctgtagcgaccccatttccacaacctgacatatcttctccaagtaacaattntgcaaacctctccttcatcatctcaatctctacaagtgagaatgaaaatcanatctcatcatactgatatcatc

SEQ ID NO: 14454 - DNA, 330 bp, Glycine max
  unsure at all n locations
ctactaaacagaaaaatggagagaccccacatcctaattaaaaagagattattttctaaaaatcagcatcatttgactctatgatcactcttgcatttaggtcataaaacctatacgctctgctattaatagcataaccaatgaacacacattcataggctctacttgcaagtttaaccctcttaagatctgggatccttacataggccaaacatccccaagttctcaaataagaacaaatttggtggcttttctttaatatctcatagggagatgtctntctttnttgattgtggattctatttagcacataacaaacagttaacaaaa

SEQ ID NO: 14455 - DNA, 334 bp, Glycine max
  unsure at all n locations
aacatgttgatgtgagatgtttggttttctaccattgaacaattcatatggagttttcttcaagataggtctgattacagccctattcatgatataacatgcagtattaacggcttcagcccaaaaatattttggaagaggggtatcattcaataaggttctagcaatttcttccaaagacctatttttcctttcaacaactccattttgttgaggggttctaggtgcagaaaaattatgttcaatgccattcttttcacaaaataaatcanattctttattntcaaattcacccccatgatcactcctaatagatataatcttgagacttttc

SEQ ID NO: 14456 - DNA, 384 bp, Glycine max
aataatggtcgatcggaatgtccatttgtttttgtactctagctgattgcaaatgtatttcgaccggaagtatagcatcgtgcccataagtcagtcgaaatggggtagtattagttgattccttaggagaatatctacatgcccatagaacttgatctaacgttttattccaatttcttggcttttgggcaatgtgttttttaatcaagttgattacaatcttattggctgcttcgacttgaccatttgcttgcgcataatatggtgtcgaggttaataatcgaaagccagttttttgggcaaattttttcatttttcgtccagtaaaaactgaaccttgatcagtggtaatttgtttctggaataccaaacctataaataata

SEQ ID NO: 14457 - DNA, 270 bp, Glycine max
  unsure at all n locations
tcactatgcacagttggtaattctgatgctgtgaccaagtcaaattaattttgaaactatattttgatcaactgtaagcattcagaatcttttgctgtcaaattacccatngccttccctactgtattgtgtggcattatgttgagtcaacatccaaatattttaaacaacattgactctgtaatgaagagagaatctcctctatccctgcattacaaactgtttgaggggacacatgtcccagacattgtctcgacatcagggaaagct

SEQ ID NO: 14458 - DNA, 383 bp, Glycine max
  unsure at all n locations
tctggtgggacatcttgacttgctntccaatctgacattttccacagattctgccttcttctattntcagattatgaatgcctctaacagcacctttgtcaatgattttcttcatacctcttaggtgcagatgtccaaatctttgatgccatattttgacttcatcttctttggagaatagacatgtggaggagtaactggtttcttgaggtgtccataggtaacagttgtcctttgatctgctgcccttcattagaacttcactcttctcatttgtcaccaagcattctgactttgtgaagtttacattgaatccttcatcacacagctgactgatgctgatcaagtttgcagtcagtcccttcaccagcagtactttgttc

SEQ ID NO: 14459 - DNA, 305 bp, Glycine max
  unsure at all n locations
atatcgacaaggggatcatcggccaactattnngaaggattgcattaattatgcaaaatcatgtgaagagtgccaaaaacatggtaccatacaacaagttctaacaagtgagttacattcgataaaaaaaccttggccttttcgaggatggacattaaatttgataggtcaaattcatccattttcctcgaaaggacataggtagatcttagttgttgttgattattttaccaagtgggtagaagcaattcccttaaaaaatgttgatcaaggggatataactaatttcatagaacaaaatatta

SEQ ID NO: 14460 - DNA, 403 bp, Glycine max
  unsure at all n locations
tattataatgaanttctcatgatatccttgtgtgngggtgatgcccganacacttgaataccctttacgatagctccacacttgcagtacatgtcaataattattgtgagaacaacgacattcaactcaaaattcccctttttacataatcatgaacccactccccatgttgaagtgcacctaagtgagcataaacacttaacaaactcatcactgtaaattcactaggctgaacccttcgtctctgcatcttgcggaaaagctccaatgcctccataagccttttattcctaacatatccactaatcatagaattctaagtaactntagttcttgtaggcatgttatcacacaacctcctagattatcaacctccccacacttagcaagccccatgatcata

SEQ ID NO: 14461 - DNA, 386 bp, Glycine max
  unsure at all n locations
tcggatccctgtcagatacaatactagaaggaattccatgcaaccttactacttccttgatgtacaactccacgagtttctccattctatacttcatattcactgggataaaatgagcggatntggtgagtcgatctactatgacccacacagcatcatgtccacgactagtcttgggtaaactagatacaaaatccatagatatgctctcccatttccattccggaatctccaatggcttcaattctcccgatggtcgttggtgctcaaccttagccttttgacatgtcaaacatcttgctacatattcaactacatctttcttcatgccatgccaccaaaaacttctcttcaaatcttggtacatcttagtcattcctggatgg

SEQ ID NO: 14462 - DNA, 427 bp, Glycine max
tatgatgatcgagatgtagaatgggtttatctacatactgagagatttaagctcttgttacttcgtagtgaagtttctggaaatgcaaagggtgaaagagccttaacgaaacttatgagttctgatcaccaaaagggaagcaaatccagtaaacaaaggcaaagaacagaagagaatacagaggatgatcgttgtggtgggagcagtatggactcagaacctataatttcctggttggctcgatcttctcatcggcttagatcttcttttcaaggcataaagaaacagaaaacttctgttacaattccaagtacaatgtcatcattcgtatatgatgaacctgttacagcaaaggggcatttagctaagagatctttgaggggtgctaaaaataatttctctagtgattctgtgtcacaaaataaaa

SEQ ID NO: 14463 - DNA, 498 bp, Glycine max
  unsure at all n locations
atccttgagtcacctgcggcatgcaagctntctccactaagttgcctgatgcctgatatgtcttttctgatggctgtggtcctagatgcagggaagaatttctccatgaacaccctcttaaggtcattccagcttgaaatggacctaggagcaaggtagtatagccaatcttttgtcactccctctagagaatgaggaaaatcctttagaaagatatgatcttcctggacattagggggcttcatggtggaacaaaaaatatggaactccttaagatgcttataaggatcttcacctgcaagaccacgaaacttgngcagcaaatgtattagtccagtcttgagaacatatggaacaccctcatcaggatattgaatgcacaagctttcataagtgaaatcaagtgcatccatctccctaagagtcctttcacgaggtggagggtgagccatgttctcagtatgaaaattagtagcggaatgttcaaaatcacaatat

SEQ ID NO: 14464 - DNA, 346 bp, Glycine max
  unsure at all n locations
cttggattagtgggctgaaccatagctaanattcactaatcataattagtgaaattttggccccaaaatttggctccacaaattcaatttcaaactcaagtgaaatttgaatagaaattcaaatttccctccaattnttgtgtgacacgtangctataaatagagtccatgtgtgtgcattntttggaactttgatcatttgagaattacacttaaaagttcagacctcatttgaagcacanaattntttgctccttttctccctttccctccactcttcttctcctaccttcaagctcttatccatggcttcctatggtggtgagcttcttcttgactcatattc

SEQ ID NO: 14465 - DNA, 337 bp, Glycine max
  unsure at all n locations
gcttatgagagagcaagatcnnatggaggaaaataaagcttgctaacaagccaacaagggagaaagaaggttgtcttcgaacccgaagattgggtttgggtgcacatgagaaaagaaaggtttccggaacaaaggaaatcaaagcttcaaccaaggggagatggaccatttctagtgcttgaaacaatcaatgacaatgcttacaaagttgagctgcccggtgagtataatgttagttccaccttcaatgtctctgacttatctctttttgatgcagatggagaatccgatttgaggacaaatccttctcaagagggagggaatgatgaggacatga

SEQ ID NO: 14466 - DNA, 464 bp, Glycine max
  unsure at all n locations
agcttaacaatccaagtgatctattacgggaatattttatccctatcatatatcttacctcacccatatcttttacatcaaagttgctagagagaaacttcttagtctcatgaagaagaccaagactattaggtgcaagtaagatatgatcaacatacagaattagaaaaataaccttactcccactgaccttcagatatatatacaccaatcaacaatattttccttatattcaaaggaaacaatgatatcattaacctcaaataccattggcgagaagcttgctcaagactgtatattcatttctntaatatgcacaccatgtgtttctttcctttaaccgagaaccccattggttggtccatataaacattctcctctaaatccccattaagaaagacagttntcacatccattggatgtagctctaagtcataacggacttctaatgtcatggatatcct

SEQ ID NO: 14467 - DNA, 326 bp, Glycine max
  unsure at all n locations
gctcagaggttcaacattcaatttcgagcgtctcgttatattacaggactcaatcagacattcgagtaaaacgttattgtcgtttgaattggcttagagcttcaacattcaatttcgagcgtctcgatatatgatgggactcaatcagacatccgtgtaaaaagttattgtcctttgaattggctcagagcttcaacattcaatttcgagcgtctcgatatatgacaggactcaatcagacatccgagtaanaagttattggtcgttgaatntgctcagagcttcaacattcaatttcgagcgtgtcgatatattaccggcgtcaa

SEQ ID NO: 14468 - DNA, 419 bp, Glycine max
agcttagagccaattcatattacaataactttttactcggatgtctgattgagtcccgtcatatatcgagacgctcgaaattgaatgttgaagctctgagccaattcaaacgacaataatcttttactcgaatgtctgattgagtcctgtaatataacgagacgctcgaaattgaatgttgaagctctgagccaattcaaacgacaataactttttactcggatgtctgattgaggcccgtcatatatcgagacgctcgaaattgaatgttgaagctttgagccaattcaaacgacaataactgtttactcggatgtctgattgagtcccgtcatatatcgagacgctcggaattgaatgttgatctcttaacgaatcaaacgacactactttttactcggatgtctgattgagtcccg

SEQ ID NO: 14469 - DNA, 388 bp, Glycine max
  unsure at all n locations
agcnttgatgcaacatatggagaggttaatgatacaacgagatgatgcgctccatgagaggttggatcaaatggagaatagagatcataatgaagaagaaaggaggagaagagggaatgatggtgttcctagacaaaaccgaattgatggtattaaactcaacattcctncatttaaaggaaagaatgatccggaggcctacttggagtgggagatgaaaatagagcatgttttctcatgccacaactatgaggaggaccagaatgtgaagcttgccgccacggagtnttccgactatgctcttatgtggtggaacaagctacaaaaggagagagcaagaaatgaagagccaatggttgatacatggacggagatgaaaaagatcatg

SEQ ID NO: 14470 - DNA, 437 bp, Glycine max
  unsure at all n locations
agcttaactatctccttacataacacatcatcaatgcttcttgctgtataaggatgcttaagtggtataaaatgtgaatacttggacagtctatccacaactactaagatagcttcataccctctggatttgggcaatccagtaataaaatccatcgatatgtcatcccatatttgctctggaataggtaatggttgtagcaaacctcctggagcagtagccatatatttctgtctttgacagatatcacaactcctcacatactcctgaatagtccctttcattcccatccaatatacatttgttgcaatcctcctatatgtcttataaaaacctgaatgacccccttgnggagtggcatggaattcttgtagcaacacaggaatcaattgtgactgactggataaaactaaccttccattgtacatcaacacacc

SEQ ID NO: 14471 - DNA, 488 bp, Glycine max
  unsure at all n locations
gtgatctctaagcaccgcggctgcagctgacccttacgagtcagttagtcatatgtaaagcttgacccttacaagacacaccatgtctaacaaactgcttatccaacaactcctctaactgtttcttaagctcagttaactctataggagacatcctataaggggctatgaatatgggtccatcaccgggtactaactctatagaaaactctatctctctctcggatggtagaccagatatatcctcagggatactttcaggaaactctctcacaacagggaggtcacacatggaaacctgtctctatttctaggttagacaagatcatgtacactngagcatcttctnttagagatgtcnataactggttggcagagataaacatcatatccttactcactccaaaatcatcagacaccatagttttatcaaaacagtttaacaagacnatggtggaagataaccaatccatacccaggataacatc

SEQ ID NO: 14472 - DNA, 385 bp, Glycine max
  unsure at all n locations
agctntanggtttatggtttagggtctaagtcttatggtttatggtttagtgtctaagccttagggtttanggtctatgccttagggtttatgttttagggctatgggtttagggttttgggttttgggtttagtgtccaagccttanggtttagggtttatggtttaaggtgtagtgtctaagtcttaagttttagggctgagggtttatggtttagtgtctcagccatagggtttaggttntagggcttagtgtttagggtttagggtttaagcctaagggtttagggtttagtgtctaagccttanggtttgggggattagggtttaagccttacggtttatgattgaaataaaattactccatactcatatgcatctaatg

SEQ ID NO: 14473 - DNA, 456 bp, Glycine max
  unsure at all n locations
agctttctataatcaacgctcattctccatcacgtggctattctggtaggaattagttcatttcgatcatttcttattactgtcatccctcctttttttggaacaacttgaacaggactaacccatgagttgtctgaaattagatagataaggcctgcctctaataacttgagcacttcttttcttacttcctccttcattataggattcaatcttctctggggttgtttcacaggcttataattggcttccaaattgattttgtgcatacaatatgatggactgattccttttagatcagaaatgtgccaaccaatagccgctctacgtcgatttagaatctgcaccagttgatcttcttcttcttccttcaaagagttgctaattataacaggtttgatctcatcttcttccaagaatacatactttanatgtgccggaagggtctttaattct

SEQ ID NO: 14474 - DNA, 313 bp, Glycine max
  unsure at all n locations
acactactagaanatgaggttnttacatcggttatttaagactttcaacatagattattaaccgatgttaaaagtaccaatgttgaaagtattatcgttaacattggttttccaaaactgatgttaacgaataaatacaacatcgattatttaaatagccgatgttatatgataagaattatcataaaaagaaagttataaatctatatatcaacatcggttttttaaaaaaatcgatgttaacctccacagttaacatcagttntttaaaaaatcgatgttaactggcactaacaacatttgttttctatta

SEQ ID NO: 14475 - DNA, 362 bp, Glycine max
  unsure at all n locations
tgaaatttaaaatatggtatttactctctggtaatcgattaccagaggatgtaatcgattatcagtggccaaaacgctntctgaaatgttnttaaatatttttgaaagcatgtaatcgattacacaattcttttaatcaattaccagcagttgaaactgtttataacagctattaaaaatttgaattcaaattttaaagcctgtaatcgattacacaatgcttgtaatcgattactaggaggaattttcgaaaataactctcaagagtcacatctgttcaagagtttttttaatagctntcanaagcctataaatgggtgacttgggacacgaatttccttagagtntttctacacaaagag

SEQ ID NO: 14476 - DNA, 361 bp, Glycine max
ctgagttgtagctacctcatgcactcctctaatgattataacatcatttctggcgctaaactgctgggagttggaagccatcttctcaattaaatgtctagcttcaataggagtcatgtctccaagggctccaccactggcagcatctatcatacttctctccatattactgagtccttcataaaaatattggagaagaagctgctctgaaatctgatggtgagggcaactagcacatagttttttaaatctctcccagtattcatacaggctctctccactgagttttctaatacctaagttatccttcctgatggctgtggtcttggaagcagggaaaatgttttctaagaatactctc

SEQ ID NO: 14477 - DNA, 458 bp, Glycine max
agcttctcacaaattcaatggtatgacttttacacaattgtccgattcggggacataactcatctagacgctcgaaattgaacaacgcaagctctcgagaaattcgaatggtcataacttttcacacggatgtccgattcggggacaaaactgatctagacgctcgaaagtgaacaacggaagctctcgagaaatttgaatggtcataatatttcactcggatgtccgattcgaggacataatatatcgagatggtcaaaattgaacaacggaaactgtcgacatattcgaatggtcataacatttcacacagatgtccgattcggggacataactcatctagatgctcgaaattgaacaacggaagctctcgagaaattcgaatggacataactcttcacaccgatgtccatttcagggacataataatatatctagaacttcgatattgaacagcg

SEQ ID NO: 14478 - DNA, 344 bp, Glycine max
tgacaatgcttactaaggcgagctgcccggtgagtataatgatagttccaccttcaatgtctctgatttatcttattttgatgcagatggagaatctgatttgaggacaaatccttctcaagagggagagaatgatgatgacatgaccaagatcgagggcaaggatccacttgcaggacttggagggtctatgacacgggctagagcagggaaagccaaggaagctcttcatcaagtgttgtccatactatgtgaatacacacccaagtttcaacgagaaaagtccaaagttgtgagttgtatcatggtccagatggaggaagactagatggcaccactttgtc

SEQ ID NO: 14479 - DNA, 407 bp, Glycine max
  unsure at all n locations
ctgagttgtagttaccttatgcactcctctaatgactatagcatcatttctggcactaaactgctgggagttggaagccatcttcttaattaaatttttggcttcagcaggagtcatgtctccaagggctccaccactggcagcatctatcatacttctctccatattactgagtccttcataanaatattggagaagcagctgctctgaaatctgatggtgagggcaactggcacatagttttttaaatctctcctagtattcatacaagctctctccattgagttgtctaatacctgagatatcctttctgatggatgtggtcctggaagcaaggaaaatgttttctaagaatactctcttcaggtcatcctagctcgtgatggaccgtggagcaaggtaataca

SEQ ID NO: 14480 - DNA, 448 bp, Glycine max
  unsure at all n locations
agctntcttgaganaacgttcttgagaagctagagcttagctacatacacccctctaataactaagctcacctccttgagaagattcctaaagaagctagagcttagctacacacatctctctaatagctaagctcacctgcttgagatgagaagctagagcttagctacacaccccctataatagctaagctcacccccagttccaaaatacatgatagtacaaaaaaagtccctactacaaagactattgaagatgcgctataatacaaggctaaaaccctatactactagtgggagtgcttagctctactgagctttagaagattgggctaagatttggtaagacataagcacttaaacaatgaaggaaagctggagttgctgcacatgatgtccaacgttatgtcaaggaataagatcgggctgcacaatgcacaatgcaagat

SEQ ID NO: 14481 - DNA, 319 bp, Glycine max
  unsure at all n locations
cacctgcggcatgcaagcttcatgaacaacttgtgataactctctctcttccaacctatagttctaaaaatgaaatctcttggttttacaagtttgagaatgttgtctcagcttcaatgggattggaaaatggagggaaatttgaatttctattcaaatttcacttggatttgaaattgaatttgtggagccaaattntggagccaaaatntcaaattatgattagtgaattttagttatggttcagcccactaatccaagatcaagtccaagaatctccactaagtgtgcttaggtgtcatgaagcatgtaaagcatg

SEQ ID NO: 14482 - DNA, 314 bp, Glycine max
  unsure at all n locations
acctgctgttcgacgggcatcgttcacggctagccaagcagcttcaaaatctgtacaagttccaaagggctatcttgcagtgtatgttgnggaagaaacaaaagcggttgtggttcccgtatcatacttgaatcagccttcattccaagatctcttgtatcaagctgaggaagagtttggatatgatcatccctcgggtggcctcacaattccttgcagtgaagatgttntccaacatataacttctcacttgaattgagaccacacatctcactgtgggagactcacatagattagtagacattntacactat

SEQ ID NO: 14483 - DNA, 401 bp, Glycine max
  unsure at all n locations
aatacacttncaaggcattcaacacttactatgagcaacatggaataattcatgaggtaacgtcaccttatacatcacaacacaatggcttggcagaacgaagaaatagaactatccttgacatggcaaagagcatgcttaagcagaagaagctacctcattcattctggngagaagctatgagcacaacaacttatttgttgaacaaatgtcctactaagagattgaaagagaaagtcccagaagaggtttggtctggaagaaagccactggttagtgatcttaggatctttggatccctatgctacaaacacattcctgatgccaaaaggaggaaattggaagacaaaagtgaaccaatgatactgataggctatcatggtactggtgcctatagactc

SEQ ID NO: 14484 - DNA, 473 bp, Glycine max
  unsure at all n locations
gcttgtaggttaaagtctcacgattgtcatgtgctcatgcaacaattgttagccgttgctatacgagacatcttgccaaacaaagtcaggttagccataactcgtatgtgctttttcttccatgctatatgtagcaaagtcattgatcctgtcatgtttgatgagctggaaaatgaggccgcaattatactgtgtcagttggagatgtattttccccctgctttctttgacatcatgattcacttgattgtgcatctggtcagagaaatcaaatgttgtggtcctgtttatctacngtggatgtacccggttgagcgatacatgaagatcttaaaagggtatacaaagaatctatatcgtccagaagaatctattgttgagaggtacatcgcagaagaagccattgaatcttgttcataatacattgagaaggctaaacttgttggccttcctgagtctcgacatgatgacag

SEQ ID NO: 14485 - DNA, 362 bp, Glycine max
  unsure at all n locations
tatttcagaagggaattctatcaatagacctcccatctttaatggagaggggtaccactactggacaacccgaatgcataattttatcgaggcaatagatctaaatatctgggaagccattgaaatanggccttatatacccaccacagtagaaagaggttcaatatatggtagtncaccaagtgaaagcataaccatagaaaaacctagagatagatggtctaaagaggatagaaaacgagtacaatacaacctaaaagcccaaaacataataacatctgccctangaatggatgaatatttcatagtttcaaattgcaagagtgctatggaaatgtgggacactcttcgattaacacatg

SEQ ID NO: 14486 - DNA, 471 bp, Glycine max
tggttacctctttcttcactatacttcatgaatcaccgtgttgagtcttctctgtggttgtcttactgggttagcctcatcttctaaatttattcgatgcatacatgtggatgggctaataccaggaatatctgccagggtccagcctatagctttcttatgcttcttgagaacaaataacaacttctcctcttgctcatcagcaagggaggcggatataattactggaaaacttttgccatcatccaagtaagcatattttaaattagatggtagaggcttcaattctggtgtgggcggctggatagtggtagaaagagatggtttctcagcctacacctcataaagaaagtcgaggtatgtgtacttactgaaacatggttagtttgatctgactctataaaatcaatctctagaggtaagacatcaccagacatgtaatcaatatctaattcatattcactctcaaca

SEQ ID NO: 14487 - DNA, 454 bp, Glycine max
  unsure at all n locations
atcatgaaactacctttacttactcttcattctgagatcacaatagaatacgcccagttacctacgagtcaaaagacatctttacttggaagaatgaacatagttaaggtaaaaatgaactcatttcacctgaagcaagcaagtccttccatctattagaaggtgagtttcagctgcttcttcctccgcatatatttatagaaagaaagtgaagtataaaaactcaggcagaattcagcatcttatacctttcgccgtgttccgccattgattacttaccactgaaacatatatgccttgtcaaaattgtgaagcataacattcacgagaataaagtgaagtgcagtaacaacaaccattgatttaatgtgcaagcacgcgaaaaatgacacgttgctntggcatatggcttcgaggcacttcactgctttccctatttcccatagcccctctc

SEQ ID NO: 14488 - DNA, 343 bp, Glycine max
agcttgcttcaaggtggatgcaattgagcgagaagttgaccttggaagtacttgtcaatgcgactgtaccatgctctcagtgcttgttttagtccataaaaagccttctttagcttgagaactttgtcttcttctaatttcacctttaatcccaacggttgttcgatgtacacttcttccacgaggactccattcacgaaggtagacttcacgtccatttgatgaattctccactagtgttgagttgcaagagagattattagtacgatggtctccaggcgagcgaccagagcaaacacctcaacataattgataattgtgaaatttgagttaatttgatagt

SEQ ID NO: 14489 - DNA, 272 bp, Glycine max
catgaatggtacaattcttagcaccttcgacagagttcattgaataaccacatggctcaaagtcaaagtcacaaatctcagaatctggaagaattattctaatgccagaattaacagtcataatggcagctgaagctgattgttctttgtagaaaacctgtgctatctctctatcaggccagtcatgcacatctctagagtgtaaacattgtcgcatggagttacagaatctgcagatgcagagtagacatgccagttctgtgatttgtctt

SEQ ID NO: 14490 - DNA, 492 bp, Glycine max
  unsure at all n locations
tactcagctgacctctagaatanaaaataagggtgctctctgtaatatatacaaaaganagatgaagaatntacttgctacttttacaagaaatttggacacatgaaaaaagagtgtccaaggtacgttgcatggcgtgtaaagaaaggtaaatctcttgctcttgtttgttttgaagttaatttagcagtctttcccatttatttgcatatctaatgatttgtttaattaaattgattgacacaatatattgtaaagtaatccctattgttaaaattgatttgattaaaattacatagattttgtataaaattatttatgcgaattgtgttcagcttaaaggaagacacaatttggccaaaaatattttgtacttgtgatgataaatgtgtgacaattataaggtgttttcatgtgaataatagtaaatccaaagaaagactgttatttgacagaatntattgtcaaaatattngcatgttctattatata

SEQ ID NO: 14491 - DNA, 326 bp, Glycine max
  unsure at all n locations
acaatggaagctgtctaganattcanatggttctatcttctcaaacggatgttcgatttggacacataatatatcgagacgctagaaattgaacgattgaacctctcgagaaattcaattggtcataacgtttcacacggatgtccgattcgggcgcattatatatcgtgacgctcgaaattgaacaacggaacctcttgagatatttaaatggtcataactattcacacgaatgtccgattcagggacttaatatatcgagacgttcgaaaattaagaacggaacctctcgtgaaattcatatgggaataacttttcacatggat

SEQ ID NO: 14492 - DNA, 469 bp, Glycine max
  unsure at all n locations
tagaatgcanaagaagaagaagaagcantcaatttaacaatgttttttnaatgcgtaagaataaattgattacaataaaataaatgagataggggaagagagaaatgcaaactcgatttatactggttcgggcatttcccgtgcctgcgtcaagtcctcaagcaacccacttgagattttcactaactttgtaaaatcctatttacaacttttgaacacccgaggaatccctttcccttgtgttcaggaaacttcacaattcaagagacaaccaatctcttgattacaactgactttctgagatgaacagaatgatttctctcctttagagtggatgatacaaattgaagttcctagatgaactctcaatagatntgtaagtgtttgccgaagatnttttaagagagcatttggcaatgaatntctcttagaatatctctctcttacattttgaagtcagacacacata

SEQ ID NO: 14493 - DNA, 467 bp, Glycine max
tatgcacgcagagttggagatgagtatgattagagaattatagttctttcttggacttcaaatcaagcaaacagatgaaggcatatacatacgtcaaaccaagtatgtgaaggaacttctgaagaagttcaagatggacgatgcaaagtcaatgaagaccctatgcatccaaccattatagttggactggatgaagaatcaaagcaggtggacaaagagacatacagaggaatgatagaatctcttttgtagctcactatgtccagacctgacattatgttcagtgtatgcctcttccaaaaggaaccaagggaagttcatatatctattgttaaatgcatatttagatatttagttggaactcctaaccttggtttgtggtttaagagagaaaaggaatacatgttgcttgattattgggatagcgaatttgtccgagatagagtggaaagaaagagcacacatga

SEQ ID NO: 14494 - DNA, 376 bp, Glycine max
  unsure at all n locations
agcttccacattnttacatagaatngatgttatttctcttatggaattggttatgcaaacatgcaataaatgaaactccaattcagattggagaatagcataaaaaatactcaattaattaatttggtccaggttttgttcttttaacttagggtaacaattattgcatagggtttatgttgaaatggaaattgtttgttgacgacatgttgcttgtntggttggtggatcaatcacgaggctaaggaacaagaagagaagagggccactactcagttgatgtttgatttgggttataaggcctatgggaagggcttctatggacatgccattgaatatcttgaagttgcactcactatcatacccaggcctacat

SEQ ID NO: 14495 - DNA, 263 bp, Glycine max
gagaccttatagtgatgagctcttcgtgtatgaccgtcatacctggttcatatctattgattgcaatccctctccacgtgtgagaattatggcatgattctgattatctggcttaccctcacacaatattgctggtccaggacgctttatcttatatatgatctgattgaaacaatcatatatagtatattattaagataataaatgatagtttacgtaagactcgaacagttaacgttaagagttccatttagttatataga

SEQ ID NO: 14496 - DNA, 392 bp, Glycine max
  unsure at all n locations
agctntacacattatatagaatcaaatgttatctctcatgagaattaccaatatccggaataattgctagcataaatctctaaggttatattcacatgagattattttaaagtacataattcattctaaagaataaagctaataatgttatatatcaataaacaaataatgatcgagtttatattacattatacatacatatatatatatatatatataattagtatataattataattaaggagtctagtctatttaattaaacatgtgttgagttagagtatactctcttatactcgtctctaattcttatgaataagaaaatataacaaagtataaataaaatataatattaatcattaatttttttacagaattactaaagtgatata

SEQ ID NO: 14497 - DNA, 367 bp, Glycine max
  unsure at all n locations
tcaagctnttgaaccttggaattgtaaatgactgctcatataaaggcttgattaaacttccatcttccaacgagcacagtaacaccctatgaggacaaccacaggaatcatgaatatcaacaaaatttcgcatatgatgatcaaggaccacaatgtgcttccccttgctgtgcgtaagtctgacagggacctgaagtggttgactttcatcaacaaaaangttggaacaatacaaattggactccacaggaccatctaatgtcccagtaaaatatattagacctgtatcctcattcacaccggcaatatgctcaaccatccattcaccttcagtgatgggtcctaaacaagtcgcatttgcatcatg

SEQ ID NO: 14498 - DNA, 386 bp, Glycine max
  unsure at all n locations
tctagatgagttatgtctgcgaatcggacatcctgtgaaatgttatgaccatntgaatntctcgagtgcttccgttggttaatttcaagcgtctcgatattttatgtcctcaaatcagacatcggagcgaaatgttatgaccattcgaatttgtcgagagcttccgtttttcaatttcgagcgtctagatgagttatgtcaccgaatcagacatctgagtgaaatgttatgaccattcgaatttgtcgagagcttccgttgttcaatttcgagcgtctagatgagttatgtcaccgaatcggacatccgtgtgaaaagttatgaccattcggctttgtcgagagcttccgttgttcaatttcgagcgtctcgatatattatgtccc

SEQ ID NO: 14499 - DNA, 235 bp, Glycine max
  unsure at all n locations
gctgttaccccatggttgaattgcttactatagagctngtcatagcaccactaaattgtctccttttgaaagttgttatgggtttaacccactaactcctcttgatcttttgcctatgcctaatgtttctgtttttaagcataaaagaaggtcaaagcaaaggcggactatgtgaaaaagcttcatgagagagtcaaagatcaaattgagaggaaaaataaaagctatgctaaac

SEQ ID NO: 14500 - DNA, 413 bp, Glycine max
  unsure at all n locations
cgcttctntnggtgcatagaatgctgtanaaaaaatagtatgtgtcatgaatctctgacataagcttgaaccaattaacattgtttgaatgacaactgttgtagttggacaacaatcacatagtttgtccacaatggtatgctttatgttcctattggttatagttttggtatgcttttgttcctattggttatagctttggtgctagaatagttcaattggagtccacaagaggaggatctccatatggtgctggagtttttgctggagatggtacaagacaagcaagtgaaatggagctggagcttgcagagtatcatggcaagtatatatgaaattagcccataaaagctagattgaattatgtgattaanattccattaagcccttctagctacgtcaacattctagtt

SEQ ID NO: 14501 - DNA, 393 bp, Glycine max
  unsure at all n locations
tattctataaccgacgacatctctatgtggtgtgtcagttttcactactataaaaagagggttntacatcggatatttaagactttcaacatagattattaaccgatgttaaaagtaccaatgttgaaagtattatcgttaacattggttttccaaaactgatgttaacgaataaatacaacatcgattatttaaatagccgatgttatatgataagaattatcaaaaaagaaagctataaatctatatatcaacatcggttctttaaaaaaatcgatgttaacctccacagttaacatcagttttttaaaaaatcgatgttaactggcactaacaacatttgttttctattataaagtaaacgaatggagttttttgaattgaggggggggg

SEQ ID NO: 14502 - DNA, 311 bp, Glycine max
actcagcttcttgtcattacgagcgctttattattatgtgcctgtttcagacatccgagtgaaaagttatgagcatttcaatttctcaagcactaccattttttaatttcgagcgtctcgatatatcatgggcctcaatcgaacacccatgtcaaaagttatggccgtttgaataggactaaagattccgtgttcaattacgagcgtctcgatatatcatgggactcaatcggacatccatgttaaaagatatggccgtctgaattggactagaacttccgagttcaaatttgagcaggtcgatatattat

SEQ ID NO: 14503 - DNA, 475 bp, Glycine max
  unsure at all n locations
ntgagaatatggttgcagccattggtcaagatgagccacatttgcccattccttgctatcatgacatcagagttccactcttgaggaaggaagttgaatatactgaaaatttgataaaaggccacagggagcaatgggtcaagtatggttataatattatgtccgatgcatggactgatcggaaacaaagatgcatcattaattttttgattaaatctcaagttggtaccatgtttttgaagtctgttgatggctctgattttgtaaggacgggttaaaatatttttgagttgcttgatgccactgtggaggaagttggagaagagaatgttattcaagttgtaaccgataatgggagcaactatgttttagcgggtaagttgttggaggagaaaaggaaacatatttattggactccttgtgcagctcattgtattngattgatgcttgaagatattgggaagcttcccttgat

SEQ ID NO: 14504 - DNA, 388 bp, Glycine max
  unsure at all n locations
tactcagcttactatacctatagttnacaatgtttcttaaatatcttacaactgtttttataggaaagtgataggaagggaagacatccagatactatccagaggatgtaaataacatgctgaagtttctagcaagtttatctaaaagattaatgtacaagtctaaattgttagtcgttttatccatcaagtaagattntagtatggttaagagaaatatcaaattcacatttatgaaaaagataataattaattttcaattcttaagtacttgtaccatctcacaatgacataaatcctataacttactacgtatattcatatttttgtgggacaacaaaagaaaatatataattagtaattntctgaggcccaccanaagttaaaa

SEQ ID NO: 14505 - DNA, 424 bp, Glycine max
  unsure at all n locations
tactaagcttgagcaggantaaatgacaatacttttacacggatgttctgttgagtcccgnaatatatcgagacgctccaaattgaaaacggaaactcctagataattcaaacgacaataactttttactcggatgcccgacagagtgtggtaatntatcgagggatgctccaaattgaaaacggaagctcgtatcanattcaaacgacaataactttttactaggatgtctgattgagtcccgtaatatatcgagacgctcaaaattgtgatccgaagttctgagaaaattgaattgacaataactttatgcacggatgtcaagttgagtcctgtaatatatcgagacgctgcaaattgaaaacggaagctcgtaggaaattcacacgacaataactctctactcggatgtccgattgaatcg

SEQ ID NO: 14506 - DNA, 347 bp, Glycine max
  unsure at all n locations
agcttataccanattcaaacgacaataactttatacacgngatgtccgatgagtcccgtaatatatcgagacgcttaanattggaaacggaagctcgtagacaattcaaacgacaantaacatttactcgaatgtcctacagagtccagtaatatattgagatgctccaaatnganaacggaagctcgtaccaaattcaaacgacaataactttttactcggatgtctgattgagtcccataatatatagagatgctccaaatggaaaacagatgctcgtgtcaaattaatagacaataactttttactcgaatgtataattgagtcctgtaatatatccaggcact

SEQ ID NO: 14507 - DNA, 415 bp, Glycine max
gggcggcgttgcaatcgcatggtgatgtcatggctcactctttccatgagtcctgctatcaagcaattggtgatgtggatggattcagcttttgaaatctggaaagatctcaaagatcaatcttcgcattcagataagtttcacattgttgatcttcaagatcaaatccaaaattgtaagcaagttaactcaagcatttctgagtaatatactcgtctaaagattttgtggaaagaactagaattgtatagatgttttttgttgtgtacatgttctagtccttgttcttgtgggctcatttctaaacttaagaaagaatgtgaagatgactgtgtgatccatttttgcgtggcctcaatgatgtgtatgcacctgtcagatctcaagtcatgcttatggaacctatgccttcctt

SEQ ID NO: 14508 - DNA, 479 bp, Glycine max
  unsure at all n locations
gcgagacaacaactttngcaccatctaactcttcaatacaagcctgcacttcatcttcctccttcttggtcaaacattctacatgattattcagtgctttttccaaaggagactgtagtaccatggcaagctgctaattctatctcccgttctaccttcttcacatcaaaataggccttctgatcacttgagtgcttcattgcttcaaataagttgaatgaaattttctgatcctccacactcagttctaacttacctttccccatatctattacacaactggcggttgacatgaaaggacgttccaaaattatggggatttcaatatccctctctatatccataaccacaaaatctgtagggaaagtaatatgtttaactctgaccaaaacatcttctatcactccatacggtctgatgatggagcgatcagctaactgcagagtcattctggttggcattatctctagctctcccat

SEQ ID NO: 14509 - DNA, 384 bp, Glycine max
  unsure at all n locations
actggatgcgttggtcatcttggtaacccagctgttcttgaatcagaaatctgtacctgtcgcaagggtttgtggcttgtgctcctctgctgaccaccatacagacctttgcccttccatgcagcaacctggagcaattgagcagcctgaagcttatgctgcaaatatttacaatagacctcctcaacctcagcagcaaaatcaacacagcagagcaattatgacctttccagcaacagatacaaccctggatggaggaatcaccctaacctcagatggtccagccctcagcaacaacaacaacagcctgctccttccttcaaaatgctgctggcccaagcagaccatacattcctncaccaatccaacaacagcaacaacccc

SEQ ID NO: 14510 - DNA, 353 bp, Glycine max
  unsure at all n locations
actcagcttagcacttctgtagggtttcagggctntccatcagctcttattaatctgccatatactcagccggtattaggcctcatgagctttctcatatccagcttactggatttagtttgggtgacttcccttttagatacttaggtgttccccttttatcatcgagattaaatgtatgtcattatgctcccttgctttccaagattactggcctgatttatggatggagcaagaagtctttatcttatgcaggtaagttagagttgattagagcagctattcaaggaattgtgaatttctggatggagatttttcctttgccgcaatctgttctggaccgaatcaacgct

SEQ ID NO: 14511 - DNA, 397 bp, Glycine max
  unsure at all n locations
agcttcaagaaaaatatggcctcagcanatttcttatttccagaatggaattctatcaatagacctccaatctttaatggagagggttaccactactggaaaacccgaatgcataattttatcgaggcaatagatctaaatatctgggaagccatagaaatatggtcttatatacccaccacagtagaaagagtttcaatagatggtagttcatcaagtgaaagcataaccatagaaaaacctaaagatagatggtctgaagaggatagaaaacgagtacaatacaacttanaagccaaaaacataatagcatctgccctaggaatggatgaatatttcagggtttcaaattgtaagagtgctaaggaaatgtgggacactctttaattaacacatg

SEQ ID NO: 14512 - DNA, 417 bp, Glycine max
  unsure at all n locations
ataactggagattattattatgttaactaaactagttaataagtatataaaagttactctttttgaacattataaaatgacttattcaattataatagttgattaaaactgggaattgaagtagtgtaagataataaaaatggacatatanttttacatatattntagagtaaaatatgtttttagtccttcaaaaaatatacaaatttgattgtagtcattaaaaaatcttattnttgtccccctaatatagaaataataatgtcacaaaatatactatcaagatcngaaatagagtatttccaatttagaggagcaaaaacaagacaaaagaattntagatgactctaanatcaattaagtttacgtacatttaaaataatataaaatgtattttatcctaaattctaatatcat

SEQ ID NO: 14513 - DNA, 331 bp, Glycine max
tcaccataactcgcatgtgctttttcttccatgctatatgtaacaaagtgattgatccacgaatggttgatgaattggaaaatgaagccgcaattatactgtgccagttggagatgtaatttccccctgctttctttgacatcatgattcacttgattgtgcatctggtcaaagaaatcaaatgttgtggtcctgtttatctacggtggatgtacccggttgagcgatacatgaagatcttaaaagggtatacaaagaatctatatcgtccggaagcatctatttgtgagaggtacattgcagaagaagccattgaattttgtcagaatac

SEQ ID NO: 14514 - DNA, 300 bp, Glycine max
  unsure at all n locations
tcatataggtgaatctcaaaataagtatcttgaaatcatttgtgaagaaaatgggaatcaccacaatttttcaacccaagaatacctcaacaaaatggtgttgtggagaggaaaaatagatcccttgaagaaggtgcaagaacccttctaaatgaaacaagtctacctaagtacttttggacaaatgttgtacatactatgtgttacaccttgaacagagtacttattatgacctatttgaagaaaaatccttatgaactgtatanaggaagaaaattggacatcacctgagagtttttg

SEQ ID NO: 14515 - DNA, 268 bp, Glycine max
  unsure at all n locations
atacagatctctgtccttctttgcaactatctggagtcaatgagcaacctaaagcttatgctacaaacatttataatagaccccctcagtagcanaaccaacaacagcagaataattatgatctttcaagcaacagatataatctatgttggaagaatcatccaaatctgagatgggcaagtccttcacaataacaacagcctatccctcctttccagaatgttgttggtccaagcaagccatatgtttcttctccaatgcagcagca

SEQ ID NO: 14516 - DNA, 355 bp, Glycine max
  unsure at all n locations
agcttatgttgcaaacatttataatagactttccttagcagaaaaaccaaccacaacaaaattattatgatctttcaagcaacagataccatccaaggtagaggaatcaatccaatctgagatggacaagtccttcacaacaacagcagcttgtccctccattctgaatgttgctggcccagcaagccatatgttccttccccaatgcagcaacagtacaacaacaaaggcaacaagcaactganggatcctcctcaccttccttagaagagttagtgaggaaaatgaccatccagaatatgcaattntagcaagagacaagagccttcattcagagtctgacaaatcagatggg

SEQ ID NO: 14517 - DNA, 323 bp, Glycine max
  unsure at all n locations
agcttgccttgcctcttgatatattngaggtattcatggtcactattaatgacaaattccttgggataaaggtagtggtgctcatgtttcaaagcccgtactaaggcatacaactccttatcataaagtgaaatagtaagggtaggaccacttaacttttcactataatnagcaattggatgggctttttgcataacacagccccaaatccaacatttgaagcatcacactcaatttcaaaagattttgaaagtttggcatgcaagtatggggcattagttagcttttgctaaaaacatgaaagattcttcttgttctctccc

SEQ ID NO: 14518 - DNA, 276 bp, Glycine max
cctttttcgaaagcccatgaattggcgtatcggtcatgtgtcctccaccttcgaggttggagctatgcgtagtgattgcttagagaaattcttcattctcaacccctttttcggaccccatgaattgtgttttcgttcatgtcgcctccaccttcgagttgtgagctatgcgtagagattgcttagagaaattctccattctcaacctttttcggagccacatgaattgcgttgtcgttcattgtgcctccaccttcgaatttgaagctatgcgta

SEQ ID NO: 14519 - DNA, 360 bp, Glycine max
ctgcagctatgacgctatccagctcttgaaccaggacggagaatgatctatatataggcttgctaagggtagagagaggaagactagagatttggatcaagtaaagtgtgttaaggatgaagaaggcaaagtcttagtgcatgaaaaagatatcaaggaaaggtggaaagcgtatttccacaacttatataatgatggatatggatatgactctagcagtctagacacaagagaagaggaccggaactataagtactatcgtcggattcagaaacaggaagtaaaggaagcgttgaatagaatgagtaacggtaagggcggtagggccagacaacatacctattgaagtgtggaaaactc

SEQ ID NO: 14520 - DNA, 326 bp, Glycine max
  unsure at all n locations
cgagcgtcacgatatattatgcncctgtatcggacctccgagtgaaaagttatgaccatntgaattgctcaagagctttcattgttcaatntcgagcgtctcgatatattatgcgcctgaaactgacctcctagtgaaaagttatgaccatttgaattgctcaagagcttccattgttcaatttcgagcgtctcgatatattatgcgcctgagactgacctccaagtgaaaggctatgaccatntgaattgctcaagagcttccattgttcaatttcgagcgtctcgatatattatgcgcctgaaaccgacctccatgtgaaaagt

SEQ ID NO: 14521 - DNA, 429 bp, Glycine max
  unsure at all n locations
tggatccaccanatccatntattacagaaacccattcgggacatcatatagctaagaaaaccccaggaaaccgcatcataggctctctcaaaatccactttgaacaacatacaaggtttttgccccctttttgcttccttcaccacctcatttgcaacaataacactgtgtagcagctgtctgccttctatgaaggcagattgtctctcgtcaatgatgtttggcaaaattttcttcaacctgcttgataagagctcggccacaatcttgtatatgcatccaataagcgagataggtctgaactcatttagtgtttggggatcggaaaccttatgaattaaggtgatgaatgatgcgttgcttcctttagggaaaatcccacttgcgtggaattcatggaggaagcgaatgatttgtcatacatttgac

SEQ ID NO: 14522 - DNA, 338 bp, Glycine max
  unsure at all n locations
tctcttttgaagttgttatggttttaacccactaaactctcttgatcttttgcctatgcctaatgggttctgtttntaangcataaaagaaagtcaagcaaaggcggactatgtgaagaagcttcatgagagagtcacagatcaaattgagaggaaaaataaaagctatgctaaacaagccaacaaaggaagaaagaaggttgtcttctaacccggagattgggtttgggtgcacatgagaaaagaaaggtttccggaacaaaggaaatcanagcttcaaccaaggggagatggaccatntgtgcttgaaagaatcaatgacaatgcttacaaagttg

SEQ ID NO: 14523 - DNA, 389 bp, Glycine max
  unsure at all n locations
gtcacctgcggcatgcaagcttccaagtgtcaaaggtaaagtcccagatagtgaatttctacttatatcaagaattaataactcgcctaatgcactaaaaatatctggaatgtgtccactaaaatggnttccagcaagaacaagcctcttcaacttgttcaagttaccaatatctggtggaattttacctgttaaaccattttctaatagtactagtgactgaaggttcttgagggcaccaaaacttgaaggaatttttccaatgagacctctgtttgatctaaactcaagtgattctaagctgccagcaagctttttccagtttgcattgnggatggtaacttgatgcctgtgttgtgattcacagcattngaatagggatagagctt

SEQ ID NO: 14524 - DNA, 368 bp, Glycine max
gctccttcaactgcacaaggttcttaatattcgaagagtatccttgcggaaccttcacccgacgaagacactgacaaaaacttatctttaccttcttggacaaagcatggcaggctgggggcaagctaaatttctttccatcagaccttggatgcaactgtgatcgtatacccatatcaactagatcttgacgggtattcaagccatgcttcgtcttgccttgaatggtaaagagtgtcccaatcacactgtcgcaaacatctttctccacatgcataacatcaatacaatgtctaacgtcaagatcacaccagtacggaagatcaaagaaaatggatctcttcttccatatgcaactctgactttta

SEQ ID NO: 14525 - DNA, 432 bp, Glycine max
  unsure at all n locations
agctagaaggtgtgtatcccaccatctnttcatagtagaatactggtaatgtgtctactatcattggccctcatttttttccgtcattgagggtgccacttgggttggcaggtctctccacctttgggcgtattctttgaaagatccgtgcccctttttgcacatgttctgtagttgcatcctatccggaaccatatcaaaattgtactgatactgcctaacgaaggcaaccattatgtccttccaagaatnggactcggaaggctccaagttagcgtaccaggtaacagctacccagtaagactttcttggaagaaatgtatcagcagttcctcatcttttgcatatgcccccatcttccaacaatacatctttagatggttcttggggcaagtagtccccttgtacttgtcanagtccggcaccttgaac

SEQ ID NO: 14526 - DNA, 403 bp, Glycine max
agctttgagccaattcagacaacaataactttttactcggatggcttaatgaagcccggaatatatcgagacgctcgaaaatgaatgttgaacctctgaccaacttaaacgaacataacttttactccgatgtctgattgaggcccgtcatatatcgagacgctcgaaattgaatgttgaacctcttagccaattcaaaccacaataactttatactccgatgtctgactgagtcccgtaatatatcgagacgctcgaagtgaatgtttaagctttagccatttcaacgatataacttttactcggatgtctgattgagtcccgaatataacagacctcaaattgatgttgagctctgactaatcaaacgacatacttttactcgatgctgattggcccgaat

SEQ ID NO: 14527 - DNA, 419 bp, Glycine max
ataatagctaagcacacctccttgagatgagaagctagagcttatctacacaccccctataatagctaagctcacccacatgacaaaaaacatgaaaataacagagaaaagtccttattacatagacaactcatcatgccccgaaatacaatgctaaaaccctatactactagaatggccaaaatacaaggcctagacgaaggaataacctattctaatatttacaaagataagcgggctcatacttagcccatgggctcgaaatataccctaaggctcatgagaaccctagggcctttccttggatctctagcccaatctacttggagtcttctagccaatgcccttgcggggtaagagagcatcattacttttcactcagatgtgcgattcaggcacatcatatatcgagacgctcg

SEQ ID NO: 14528 - DNA, 468 bp, Glycine max
  unsure at all n locations
agcttgctaacccatggaagctcctaatatctcccacactttttgnggtgggccattcttggatggccttgattttctcagggtccacttggaccccatttctaccaactacaaaacctaagaagactatattatctacacaaaaggtacacttctctatatttgcatagagggtgtttttcctaaggactgaaagaacttgcctgagatgtcctaagtgatcatctaggctcctactgtacactaaaatatcatcaaaataaacaactacaaatctacctatgaaatccattaagacatgatgcataagcctcataaaggtgcttggtgtgttagtgagcccaaaaggcatcactagccattcatacaaaccaaacttggtcttgaaagcggntntccactcatcaccctttntcatcctgatttggtgataaccacttttaagaatcaattttgaaaagatattgg

SEQ ID NO: 14529 - DNA, 446 bp, Glycine max
  unsure at all n locations
tgagcncatatgctatgcccatcatcttggtgccaaagtattatgatactntgagaatatgcacaaattgtagagccatcaataacatcactgcaagtgatcatgaatcccttaagcatctaaagggccagggcaaactcaataagtggtatgccaaatgggtagagtatctagagcaatttccttatgtgatcaaacataagcaagacaatgctaatgttgtggctgacgcctcttctaggaggtattatttactttccatgcttgaaactaagatgcttgcatttgatcatataaagaagttgtatgcttgtgatgatgacttctttaatttgtttaaattatgtaaaaagggtgctcataatagatactttagacatgatggttacctattcaaagataagcaattgtgtgtgcctaagagttccatgcttgagttgtttatt

SEQ ID NO: 14530 - DNA, 373 bp, Glycine max
  unsure at all n locations
agctntgaaacatacatcatggttatttattgttgcaatngctngnagaaaagncatactaggtaaccataaggatgcatggacatttggagcggttgatcccaatagtggcactgcagcactgcttgaggtaacaatggatttgtttgtaggcattgctttgcttatttatatcaaaccaatggcacaagtgacatgtctcatgaaattaggtggctcaaaggctacggaagcttcagaaaaaagggtggagacctagaagaacaattttattatgtaattgggatgctgaggaatatggcctctgaattntctttacttctttngtctctccttgntactcacaaaggtgtgtgcaacatgaaagtttgat

SEQ ID NO: 14531 - DNA, 507 bp, Glycine max
  unsure at all n locations
tgtagaanattganacgacananatnnnnatctaatagttcctatataattccgtagtatatcgagacgctcgaaattcaaaataaacctctcagcaaaatgaaacgacaataactttttactcgaatgtccgaatgaatcccgtaatatatcgagacgctcgtaactgaaaacagaagctctgagcaaattcaaaagataataacgttttactcgtacgtccgattgtttcctgtagtatatcgagaccctcgtaattgaaaccagaagcccgtagcaaactcaaacggcaataaatttttactcggatgcccgaatgaatcccataatatatcgaggcgatcgtaattgaaaacagaagctatgagcaaattcaaacgacaataactttntactcggatgaataccgtaatatatcgagacgctcgtaattgataacaaaagctctgagcaaattcaaacgacaataactnntttacttgatgtccgaatgttcccgtagtatat

SEQ ID NO: 14532 - DNA, 435 bp, Glycine max
gattgccgctcaagacatttatagaacatgttgaagatatttgttattgatgatcattaagtgtaatttaccttatttattttactgacactcttagttcatttatgatatgtttctaaatatttgtgctctatgtttgcatgaatatttgtattagaataatgttagcaggttttgttttgaataaagacattatgttgtatcaattatgtactcctaactaatgatcatatttaggagaagactaatttgtaatacatggaaggaactatgtagattaagtgatgtacaaccgccacgacttgaattggtttctatttttaataatgaaattatgatgtatccaatgtatagaacaatttactcatcttaatgtgcattatgttagtttaatctatttatctatatagaccacaacgtgtagtaatgttacac

SEQ ID NO: 14533 - DNA, 493 bp, Glycine max
  unsure at all n locations
actcagcttctatccaggctcatcttggtggtgaagctctttcttcctgtcttattccctagtggatgacgccgcctcttacctcttctcctttgtcttccgctgcatctccaggtggaaaatcaccattaaaggacctcattgaagctcatagatccagcctccatagaagctccacaagcaagcttccatcacatgggcaaaggctgtgtccactattctttgtaaatgttagaataggttttccttcttttgggccttgtattttgatgcaatcttaccccccaagcttattggatagaatactccaagaggattgggctagagcagctaaagaaggccctaggattctcatgaacctcagggtagatttctgagcccatgggccaaggctgggtccactcttctttgtaaatattagaataggttttctttcttttaggccttgtatnttgatgcaatcctacccctcaagcttattggatagaagact

SEQ ID NO: 14534 - DNA, 409 bp, Glycine max
  unsure at all n locations
catgcaagcttgaaattgaacaagggaagaacnngattattcaatttttcttaacttttcactcggaagtccgattcgggcgcataatatattgagacgctctcgtgaaattcaaatggtcataacttttcactcagaggttcgattcaggcgcataatatatcgagaggcgcataattgaacaacggaagctgtcgagaaatacatatggtcataccttttaactgcggagttctgatttaagcgcataatacatagagacgctcgaaattgaacagtggaagctctcgagattttcagaggggcataacttttaactcggaggtccgagtcaggcgcataatatatggagacgctcaagattgagctacggaagctctcgagaaattcacatggtcgtaacttttaa

SEQ ID NO: 14535 - DNA, 498 bp, Glycine max
  unsure at all n locations
ccctctttgaacaaatacccctcagccaaatagaatctattttgtgcctttntcccacaactcttgtaaatgggagagaaattttcatctaaagcatacaagtccctgatattatcaaatcctaaaatttgagctcctagggagcaaaacaatgtgtgtttcctagagagggcatcaactaccacatttgtttttccctttttgtatttgataacatatggaaatttctctaggtactctacctattttgcatgcctcttgtttaacttgctttgccctctaatgtacttaagtgattgatgatcactatgaatgacaaattccttggaaataaggtaatgttcccaagtttggaggactcttattacggcataaaactctgtatcataggtggggtagttgagggaggcactatgaagtttttcactaaaataagcaatagggtgcccaccttgtaacaatacaactccaactcccactccagaggcatcacattct

SEQ ID NO: 14536 - DNA, 535 bp, Glycine max
  unsure at all n locations
agaaactaagcttacttgcnagaataccaagaaattccttatctgtctttctatcatatttcctatgttntcttttccattgtttaatacaaaacacttgcaaccaaagacatgaagatgtgagatgtatggtttcctaccattgaacaattcatatggagttttctttaagatgggccttattaaagccctattcatgatgtaacatgcagtattaacggcttcagcccaaaaatattttggaagaggaatatcattcattaaggttctagcaatttcttccgaagacctatttttcctttcaacaactctattttgttgaggggttctaggtgcagaaaaattatgttcaatgccatgcttttcacaaaataaatcaaattctttattttcaaactcacccccctgatcactcctaatagatataattntaggattnttcttattttgaataacttttgcaagtttcctanatgcttgaaatgcatcattcttatgagtgataaatagtgtccaagtgtatctagaatagtca

SEQ ID NO: 14537 - DNA, 500 bp, Glycine max
  unsure at all n locations
acactataaaactcagctgtttcttgaattccagacacaagagagcttccttttttgggatgtaatttgcaacctgcacaatcagaatctctatatcttgactcatccactgatttacctttctcatctaagtcaaggtaggttgaagttgtcgttggagtatatggttctttgcattttttatgccaaatttcttaattagttctataaagtatttggtttgacatangaaggttccatgtttcatctactggacttggagtccaaggaagaaatttaactcacccatcatagacatctcaaattccttctacatacaactagaaaattccttacacaaaatttcattactagcaccaaatataatatcatcaacatatatttgaacaattaacaactcactatttactttcttaataaacaatgttttgtcaacttggcctctagtgaaagaatgcttaattataaaactgtttaatctatcatacgatgaccttggt

SEQ ID NO: 14538 - DNA, 535 bp, Glycine max
  unsure at all n locations
tactcaagcttggatgcttgtccaanaggcaaacaagtcaaagtcncttttttataaaaaggtgtaagtttctacatctaaacctttggaacttttacacttggacttgcttggcccctctagaactatgagtttgagagttgactattatgctcttgtcattgttgatgattactcaagatttacgtggactttttttcttgctttaaaaagtgttgcttttaaagctttcaagaaacttgcaaaagttattcaaaatgaaaaagatttgaaaattaagaccttgagaagtgatcatagaggtgaattccaaaatgaagattttaaaactttttgtgaagaaaatgggatttcacgtgatttttctgctactagaacttcacaacaaaatggggctgcagagaggaaaaatttgtgtttgcaagaactagcaagaactatgttaaatgaaactaacttagcanattatttttggacggatgccataagtacaactggctatgttctcaatagggaatttaataatacctattta

SEQ ID NO: 14539 - DNA, 436 bp, Glycine max
  unsure at all n locations
tcacattgaattagcacctaaggcatatagatggtttngtgtatcttaacataagagatttcagatggactttgatcctaatcccacagccgaccttttcacgagatctctacttaaccctttggttaaatgatcggccaaattctgctgagttctcacaaactccactggtatcacaccatgcatgattaactcccgaaccatgttgtttctaacacccaagtgtctagacttcccattatacacttgactatatgccttagccaaagtagcctgactatcgcacctgatagacatgggaggtataggtttgggccacaatggaatctcatagatcagatttcttagccactcagcttctttaccagctgctgctaaagctacaaattcatattccattgttgaaattgtaatgcaggtctgtttcttggatgcc

SEQ ID NO: 14540 - DNA, 373 bp, Glycine max
  unsure at all n locations
tcttcatcaaatnngaaaacaatgtctttgtttagcagattactcagcagccttgcaatcttagagaagtccttgatgaacctcttatagaaccctgcataccctaggaaactcctgatgcctttaacatttgatggtggtggcaacttttcaatgatatctatctttgcctgatctacctcaattcctcgggctaaaattttatggcccaagactatgccttcttgaaccatgaagtgacacttctcccaatttaacaccaagtttgtttctacgcacctttgtagtaccattgagggccttacactggaatggnggtataagaactgattgaaaaaggggtgaaagaaagaaatggagaaaatggtgaaaa

SEQ ID NO: 14541 - DNA, 357 bp, Glycine max
  unsure at all n locations
accatgacccttgctcaaagtaanttaattacctcctaagtttaaagacccagttagttttttgtaccatgtgttattggatacacgatgtttgaaaaatcctcgtgtgatttgggggctaatgttaatctaatgtccctattntaattgtttcaaaaagcttgctattgatgagctgcaacctaccatatgttattgcaaaagacgaatcgacccgtcaaacatcctgtgagaattgtggaggctgttccagttaagatgaggggttgttctattccatgtgattttgtggtgttagaaataatggaggagacatncaaaatctccattatcttaggtaaacccttcttatcaacg

SEQ ID NO: 14542 - DNA, 483 bp, Glycine max
  unsure at all n locations
agtcacctgcangctgcaagcttggccttttacgtctggaatgtgattgtagcatatatatccaaagaccctcaggtgctgtgttgatggcttcttcccgttccaagcttcaattggagtcttgtcttttacagacttagttagacatctgttgagtatgtaaacagcagtgtagactgcttcagcccagaatgtgttaggtagtcccttatccttgagcatcgatctagccatttctataactgtgcgattctttctcttggacactccattntgttgaggagaatatgcgactgtaagttgtcgctcaataccttcatcctcacaaaatctttcaaactagcgagaggtgtactctntgccgcgatcacatcttagtacttttatccattttccactntgattntcagcaagggccttgaactctttgaatactccaaagacttctgattnttcttttagaaaatatacccatgtcattct

SEQ ID NO: 14543 - DNA, 428 bp, Glycine max
  unsure at all n locations
aaaaaaactctagattctcaagtcataggcatttacaacaacgatcacattagagaggttgaataatatattaataaaaaataataactttttgcaaataaaagttttatcacaggtttagaaatatatatgntttggagtcatctactcatcagtaaaataagtttaataaaacatagtttgatcatccaatatatctatgaagtaatatttccaaaaaaggtttttaagaaaacacttggtcagaaaaaaaggtaacaaagaaaactaagataatacttaataaaatggtttaatagagatatattagcatttgatttgtactagttcacttaaataaaactaccttcaattcttctttacacaactataaagggttccattaataaaaaaaactttgattacaaataagtattttgtcttgtcac

SEQ ID NO: 14544 - DNA, 440 bp, Glycine max
tcctgatatgacagtcaccgctttatgagcactgtacaccagcagcgcttcgaggccatcaagggatggtcgtttctccgggagcgacacaaaatataagcaaaaaaacacttcacaaaatatatatatgtatgtttaggtagtgaaaataccttagatatgcatgtatgtaagcaaaaaaacacttcacaaaatatatatatgtatgtttaggtagaaagataccttagatatgcatgtatgtaaacaaaaaaatacttcacaaaatatatatatgtatgtttaggtagaaataaccttggatatgcatgtatatagcaaaaataccttacaaaacatatatatgtatgtttaggtagcaagataccttggatatgcgtgtatatagcacaaatacctcacaaaaatatacacatgtgtaggtagcaaaatacctcatg

SEQ ID NO: 14545 - DNA, 514 bp, Glycine max
  unsure at all n locations
ntatctnttaagatctttaagtgcagaatttcaggaataatttatatctcatccagcgcaagttgctgcagcccagatacgcacactgctatataaacatgaaggctgcacgagttctgtaccaagtccgggattgaagagttattttgtgagttttgggacttgagtgttttgtgagccaccttgatgtcaccctaacatcaagtgttggacctgagtgtgtagagttgatctctattgttcagagagcaatctctggtgtgtatttgatttaactgtaaacacgggagagtgattgagagggagtgagaggggttctcatatctaaaagtggctcttaggtagaggttgcacgggtagtggttaggtgagaaggttgtaaacagtggctgttagatcttcgaactaacactattttagtggatttcctccctggcttggtagcccccaaatgtaggtgacgttgcaccgaactgggttaacaattcacttgtgttatttactatgttaatct

SEQ ID NO: 14546 - DNA, 397 bp, Glycine max
  unsure at all n locations
ttgaattagaatttcaaatgattttaaaagacttttttaatcaggattttataaaaaaaagtcttgtggtattcaatcatgatttttatatagtataaataagtattttgctattcaattaagacatttgagattttttaaggaagacaacaaaatccggttgtatttaatcgggattttttttataacttataaaaagtcttttggtattaaaaaatatatgaattttgatggatttttttaaagaagatttttgatagatttcattgaattttactagattttttctttctttttctanttggtaccagactttattttctctcatcgtcacacatanccgcttctctctttaatattttttaatatacgtgtgttatatatatttgccctattc

SEQ ID NO: 14547 - DNA, 478 bp, Glycine max
  unsure at all n locations
ctggttccaatgctctgtttaggctctcccatatcttatgtaaatctaggatctttatcagacactatgctagatgacacaccatgtaatctgataatctcactaatatacaaggaggtcaacttctctaaggtaaatatgatattaatgggaataagtgagtagacttggtcagtctgtcaacaataacccagatagaatctacacctctaggggttctaggtagtcctacaacaaaatccatggaaatactgtcccacttctattgggttatctccaagggcggtaacttccctgaaggtctctgatgttctatcttagccttctgacagactaagcatgcatacacaaactcactaacctctctcttcatgttgggccaccaaaacatcatcttcaaatcctgatacatcttggtagcaccaggatggatgctcangttactcctatgtccttcctctangatcatcttcctatg

SEQ ID NO: 14548 - DNA, 411 bp, Glycine max
  unsure at all n locations
atgntcaaaggacactttatatccctttttaatcaactgacctacactcagcaagttttggtcaatgttaggtacataaagaacatttgatattaatttggtacctgaacacgttgaaattgcaatagttccttttccttttactggaatatagccactatttccaattctaacctttgagacactagttggcttcaaatctttgaataaagtcttatcatatgtcatgtggntcgtacaaccactatcaatcaaccaactttcacttgattcgctactcaagaagcatgtggccacaaacagttggtcctcctcttcttgattagcaatctgagctccctcatcatggtgaattttgttggcgcagatcaccatttcatgccctatctggttgcacttgttacattttgc

SEQ ID NO: 14549 - DNA, 408 bp, Glycine max
agcttgctaacccatggaagctcctaatatttcttacactttttggggtgggccattcttggatggccttgattttctcaaggtccacttggaccccatttctaccaactacaaaccctaagaaaactatattatctacacaaaaagtacatttctctatatttacatagagggtgtttttcctaaggactgaaagaacttgcctgagatgtcctaagtgatcatctaggcttctactgtacactaaaatatcatcaaaataaacaactacaaatctacctatgaaatcccttaagacatgatgcataagccttataaaggtgcttggtgcattagtgagcccaaaaggcatcactagccattcatacaaaccaaacttggtcttgaaagcggttttccactcatcac

SEQ ID NO: 14550 - DNA, 300 bp, Glycine max
  unsure at all n locations
gacacgannaataagataaatagagtgtttaatggcataaaaccaatatcgttttggtaattgagattgaaacattaaagcccgggcaacatttaaaatatgttgatgcttacgttcaacacgtccattctgttgaggagcatacacgcaactagtgtgatgtataattccttttgaagagaataaatctttgagaagaaattatgtgccgttgtttgaacgtatgcattttattttggaatcaaatagactttctattagaacaatgaagtgttggacatgggttttaacctcagattt

SEQ ID NO: 14551 - DNA, 353 bp, Glycine max
  unsure at all n locations
tcatcaatatcatttcatgttctagtaactttccaaacaaagtagcaagagacatattagatagatctcgcgattcaataatggttggtaccttgggttgccattccctgcttaagcatctcaaaactttatttggaaatttttttcctaaagatgcaagatgattaattatgtgtgtgaacctcttttgcatatcttgtatgctntcatctggattcattctaaataattcatattcatgggttagtgtatttatcctagatctttttacatctgttggaccttcatgtgttacctatagggtatctcacatatnctttgcacttctacaatttgataccctaaagtactca

SEQ ID NO: 14552 - DNA, 416 bp, Glycine max
  unsure at all n locations
catgcaagcttctaaactttatacaagaangaagcnctgataccacttgttggacttttggcctcaganatcttaagaagggggggggggttgaattaagatatcacaaactattccccaattaaaaaattctactttaaatntaactaaacaacccaagattccttttaaaaaggaactcctaaataataatgcaaattaatcttactaaataaaaataaaaagaaataaacactaaaggagtttaagggaagcgaaaatgcaaactcagatttatactggttcagccacacccttgtgcctacgtccagtccccaagcaacccgcttgagagttccactatatttcaaaatccctttacaagatctgaaccacacaaggacaatccttcctttgttttcatatttctttacaac

SEQ ID NO: 14553 - DNA, 438 bp, Glycine max
agcttatgctgcaaatattttactttagactcttctcaaccttatgtatcaaaaacaaccacagcagagcaattatgacctttccagcaacagatacaaccctggatggaggaatcaccctaacctcagatggcccagccctcagcaacaacaacagcagcctgctccttccttccaaaatgctgctggcccaagcagaccatacattcctccaccaatccaacaacagcaacaaccccagaaacagccaacagtggaggcccctccataacctttcctcgaagaacttgtgaggcagatgactatgcagaacatgcagtttcagcaagagaccaaagcctccatttagagcttaaccaatcagatgggacaattagctacctaattgaatcaacaacagacccagaattctgacaagctgccttctcaagctgtcta

SEQ ID NO: 14554 - DNA, 532 bp, Glycine max
  unsure at all n locations
ctcagcttgtggccttggatcttcttcatcaatggagtccttttcttcttgtttatcaatgacagnggaatgcagaaggaggaaaggtgattggagatgccacttcaaggagaagagagtcaagaacaagttcaccaccataggaagccatggataagagcttgaaggttggagaagatgagtggagggagagggagagaatgggcacgacaattatgcctcgaatgaggtctaaaatttgaagtgtaatttctcaaatgatcaaagtagaaataatgcacacaaaaggcctctatttatagcctaagtgtcacatgaaattggagggaaatttgaattntattcaaatttcacttgaatttaaatttgtggagctaaatttggagcctaaagttcactaattatgattagtgaattttagctatggtttaggccactaatccaagatcaagtccaagattctccactgagtgtgtngttattcgtcttgtacgactaacttttgtatagaaaaatattttcaaaatatggg

SEQ ID NO: 14555 - DNA, 450 bp, Glycine max
  unsure at all n locations
agcttatgctgcannaattttatagacctttctaaccttatcagcaaaatcaaccacagcagagcaattatgacctctccagcaacaaatacaaccctggatggaggaatcaccctaacctcagatggtccagccctcagcaacaacaacagcagcctgctccttccttccaaaatgctactggcccaagcagaccatacattcctccaccaatccaacaacagcaacaaccccagaaacagccaacagttgaggcccctccacaaccttccctcgaagaacatgtgaggcaaatgactatgcagaacatgcagtttcagcaagagaccagagcctccattcagagcttaaccaatcagatgggacaattggctacccaattgaatcaacaacagtcccagaattctgacaagctgccttctcaagctgtccaaaatcccaaaaatgtca

SEQ ID NO: 14556 - DNA, 459 bp, Glycine max
  unsure at all n locations
atagaactctntacatatcaaatacattcgttagaataaatgaaacaaattagataaagcagaagctcataataacactttcacaagttaagtatggtcaaataactgacatatctcacattagaaggtgaaacataacattttcttgcctccatatcctatcttgcatctaactctgtgatagaagcttcattgaccgaccacagtttgtgatttgccgacgaagaagttgcttcagatgtaacatttgttccggagtaaaagccaggagccattggctntggcaacaatttatcaccactcaacattgaaagaactgatgacatgtgtggcctatcttgtggtctttgttgcacacataataggcctacctgtatgcatcgtatgacttcatagggcttacattgttctcctaccacatcatccagtagttccagtgccctatcttcagtccataat

SEQ ID NO: 14557 - DNA, 472 bp, Glycine max
  unsure at all n locations
cacactctttataacacactctcttctgttggtcctcaatagatggagaactataaaatcagaataatgactgatcatatgagtagtgggacctgtcaaatttgtgatttttaagaaatatgcgccaacaaaaaagagtggtcaagagaatgtgttatagacagaggagctaccatttctctgtttaggaatggtgttngtagctattagtgaaaatagaaatagagaatattttccttatgtcaaacaggcttctgcattactatatttagttattacaacatgatgatagatcattatatattttttctttctataaaacaaatgatttctttattgacttggggtggtgtatataaaaacttatcaacacattttacttttctttctatgcctgttcattccaatgtacaaatgattggcttatgatgcaacaaaatctatatcaggaactaactagctcttttaatat

SEQ ID NO: 14558 - DNA, 524 bp, Glycine max
  unsure at all n locations
cgcanagcagtagtacttgtaatagtgactcctcatgtttttttctttctcagcaaaagtggtgaagctctctctaacttttagacaagggtacaacaaactatgaaattcttttttaactctcagtttttattttgcactttttatttaggtcataaatataacgatgagggatagtaaaaataaaagtgtactagtaggtaaaatatgccatgaaatgaaaatagataatttcacaaatatctatggtttgcagtaaaataaattatttttcctctacttgcttattaatgaagcatggataagtaacaatgtacacgaacctacgggtacagtaatttgaaattacttaatttgttctaatttaattaaaatataaataattcagaattatttatttttagtttaaatatatgtttgaaaagtatttaattttttataatacattcttcaaactntnttagttntatttaattaacagatattcaggtataaccgtagatatactcacaaatatntataaa

SEQ ID NO: 14559 - DNA, 453 bp, Glycine max
  unsure at all n locations
ctcagcttgaatgcctattcatggagttgcaagaacatcnctgatttatcaacactngcacagnggccaaagatgcatgggagatcctgaacatcactcatgaaggaacctccaaagtgaagatttccagattgcaactcttggctacaaaattcgaaaatctgaagatgaaggaggaagagtgtattcatgacttccacatgaacattcttgaaattgccaatgcctgcactgccttgggagagaggataacagatgaaaagctggtgagaaagatcctcagatccttgcctatgagatttgacatgaaagtcactgcaatagaggatgcccaagacatttgcaacatgagagtagatgaactcattggttctcttcaaacctttgagctgggactctcggatacggctganaagaacagcaagaatctggctttcgtgtccaatgatgaat

SEQ ID NO: 14560 - DNA, 473 bp, Glycine max
  unsure at all n locations
actcagcttaacatcagaccacttccagggtgctggaactacttcacatggtcttgatggggcctatgcaagttgaaagccttggaggaaagaggtatgcctatgttgttgtggatgatttctccagatttacctgggtctactttatcagagaanaatcagacacctttgaagtactcaaggagttgagtctaagacttcaaagagaaaaagactgtgtcatcaagagaatcatgagtgaccatggcagagagtttgaaaacagcaagtttactgaatactgcacatctgaaggcatcattcatgagttctctgcagccattacaccacaacanaatggcatagttgaaaggaaaaacaggattttgcaagaggctgctagggtcatgcttcatgccaaagaacttccctataatctctgggctgaagccatgaacacagcatgctacatccacaacagagtcacacttaga

SEQ ID NO: 14561 - DNA, 432 bp, Glycine max
  unsure at all n locations
agttgagcatggtaaaaagattcgtcttttttctcttagaggtgactntgagcgtttgtttatggaggagtccgagtcaatttctgattatttttctcgagtattggccatagtcaatcaacttaaaagatatggtgaagatgtcgatgaggtgaaggtcatggaaaaaatacttcgaactttaaatctcaaattttgacttcattggtaccaacattgaagaaaacaaggatttaaagaccatgactattgagcaactcatgggttccttacaagcatacgaagcaaaacaaaagagaaaaattaaacaaaaggaggctacggagcaactactacaactcaacgtaaaggaagcaaactatgcaaattacaagagccaaagaggacgaggtcgcggccaatatcgtggacttggactatgacatggaggag

SEQ ID NO: 14562 - DNA, 258 bp, Glycine max
aacctataaagactatattatctacaccaaaggtacacttctctatatttgcatagaaggtgtgtttcctaaggactgaaagaacttgcctgagatcgcctaagtgatcatctatgctcccactgtacactacaataatctcaaaatgaacaactacaaatctacctatgaaatccattaacacatgatgcataagcctcataaaggagcctggtgtgttagtgagcccaaaaggcattactagccattcatacaaac

SEQ ID NO: 14563 - DNA, 437 bp, Glycine max
  unsure at all n locations
taagcacctctntccttacctcttccttcattgttgggtctagccttctctagggttgtcgaactggcctatagtcttcttccatcattatcttgtgcatgcagtagacagggctaatacctttgagatctgatatatgccacccaattacttccttgtgtttcttcagaatttctactaacctattttcttctttggatgtgagtgcattgctgatcaccacaggcttagcctcatcttcttccaggaaaacatactttagatggttggataatatctttaattcttccttcttcttctcagatggagtcttgctctttagttcctcaaatctggtttcctcctcagggatgctatcttatcaatccaagtcttctaagcaagccttgagatcttcttcttcttcactggttaggcaatctaccgcattcaccatg

SEQ ID NO: 14564 - DNA, 350 bp, Glycine max
  unsure at all n locations
agctngagaatggaggatttccttgagggtcctctcttaggcaatcatggaacacagctccaaactcaaaaatggaggacacatgaatgacaacgcaattcattcatggggctccgaaaaagggtaagaatggaggatttgcttgagggtcctctcttangcaatcatggaacacaactccatactcgaaagtggaggacccacgaacaggcctaagcaataacattcatgtggctccgaaaaaggatgagaatggaggattgcgttgagggtcctatcttangcaatcatggaacacagctccaaacttgaaaatggaggacacatgaatgacaacgcaattcattcac

SEQ ID NO: 14565 - DNA, 444 bp, Glycine max
  unsure at all n locations
gttgccaatntagttntcgctagcgaaaggatcgaagtgggtctgaanagaggcaaattagatcatcttactttgataaataagaagcctgcggcaaatggagagagtaagaatgagggaggtgttatacaagtggcctcagatatcttaagaagggggggttgaattaagatattccaaacttttctcctaattaaaaatctatcttactttttactaaagttatgaattcccttaataacaatcttcttaaatattaattcaaatgaagcaacttgaatatgaatataaagcaataataaataaaggagattaagggaagagaaaatgcaaactcagttttatactggttcggccacacccttgtgcctacgtccagtccccaagcaacccgcttgagagttccactaacttgtanattccttttacaagttctaaacacac

SEQ ID NO: 14566 - DNA, 370 bp, Glycine max
  unsure at all n locations
tactcagctntactctctggtaatcgattaccagaggatgtaatcgattaccagtggcctaatacgttntataacagctataaaaatttgaattcgaaattttaaaagctgtaatcgattacacaattgtggtaatcgattaccagcagttagtaaacgttttaattcaaattttaaaagcttgaatcgattacacaattgctgtaatcgattaccagacaggaatttcagaanaataatttcaagagtcacaacttttcaaaggctttactcatgaccaccaatggtctatatatatgtgacttaaacacgaaattgctcagagattttcagaacaacaaagtgtttatcctctcaaaaagcaatttca

SEQ ID NO: 14567 - DNA, 318 bp, Glycine max
  unsure at all n locations
catttacctggggtgaaaaacaagaaccagcctttggttttctcaaagaaaagcttactaaggcacccggtctaacttttcctgacttttctaaaacttttgaactaaaatgtgatgcctctggagtgggagttggagttgtattggtacaaggtgggcaccctattgcttattttaatgaaaaacttcatagtgccacccttaactaccccacctatgataaagagctttatgccttaataagagccctccanacttgggaacattaccttggttccaaggaatttgtcattcatagtgatcatcaatcacttaagt

SEQ ID NO: 14568 - DNA, 442 bp, Glycine max
  unsure at all n locations
tgctctgtttaggctctcccanaatctagatgtaaatctaggatctttatcagacactatgctagatgacacaccatgtaatctgataatctcactaatatacaaggaggtcaacttctctaaggtaaatatgatattaatgggaataagtgagtagacttggtcagtctgtcaacaataacccagatagaatctaaacctctaggggttctaggtagtcctacaacaaaatccatggaaatactgtcccacttctattgngttatctccaagggcggtaacttccctgaaggtctctgatgttctatcttagccttctgacagactaagcatgcatacacaaactcactaacctctctcttcatgttgggccaccaaaacatcatcttcaaatcctgatacatcttggtagcaccaggatggatgctcanngtactcctat

SEQ ID NO: 14569 - DNA, 327 bp, Glycine max
  unsure at all n locations
agcttagcccactagaactaatgatgctaattgtgttgcagattttgtcagatctaatctggtttgcatggttggagtacctaaagcaatcgttactaatcaagaaacccgtttttgcaacaaatcaatgcatgccttgcttaaaaagtaccgggttgtacatagggtatccacaccataccacccccaaaccaatgaacaggtagaaatttctaacagggagatcaagagaattttagagaagattgtgtagccaagcaggaaagattggagtaccaggcttgatgatgctctntgggaacatcggactggctacaaagcacccat

SEQ ID NO: 14570 - DNA, 410 bp, Glycine max
attcacggatgtctaattgagttctgtaatatatcgagacgctgcaaattgaaaacggaagctcgtacgaaattcaatcgacaataactttttactcggatgtccgagtgaatcaggtaatatatcgagatgctcaaaattgagactataagctctgagcaattgaatgacaataactttatgcacggatgtcctattgagtcccgtgatatatcgagacgctccaaattgaaaatggaaactcttagaaaattcaaacgacaataactttttactcggatgcccgacagagtgtcgtaatttatcaagagatgctccaaattgaaaacggatgctcgtatcaaattcaaacgacaatgactttttgctcggatgaatgatttagtccccgaatatatcgagacactcaa

SEQ ID NO: 14571 - DNA, 405 bp, Glycine max
  unsure at all n locations
agcttgtagtctcaattntagcgtctcgatatattacccaattcaatcggacatccgagtaaaaagttattgtcatttgaatttcctacgagcttccgttttcaatttggagcatctcgatatattagaggactcaaccggacatccatgtataaagttattgtcaattcaattttcttagagcttcggattaaaattttgagcgtctcgatatattacgggactcaatcagacatccgagtaaaaagttattgtcgtttgaatttgatacgagcttctgttttcaatttggagcatctctcgataaaatacgacactctgtcgggcatccgagtaaaaagatattggcgtgtgattttctaagagtttcgtttaatttggagcgtctgatatattacgggactc

SEQ ID NO: 14572 - DNA, 393 bp, Glycine max
  unsure at all n locations
tctaagtcacctgcggcatgcaagcttgctcgtcttgctgatatttatcattctacttttctgatgatgaccgaggaacaattagggatcaactngaaacttatgtgcttcaagtgagaagaaatgcttctttttccactagcgaagatgttcaaagtctggctatgaagatggttcaaactgagaagcatctggtatttccattggattataaacttattgagctagctatgatattgccggtgtcgacagcatccgttgaaagagctntgtcagcaatgaagattatcaagtctaaattgcgcaataagatcaacgatgtgtggctcaatgactggatggtgtgttacatcgagcgggagatattcaagtcgcttgatgatattgatatta

SEQ ID NO: 14573 - DNA, 430 bp, Glycine max
  unsure at all n locations
aattcatgcaggtggacgttctactaattattctgacttgcagcaacctnctatcccacttncatttccacctagagcaattccaaacaaaaagatggaagaagtggataaggagatcttggagaccttcaagaaagtagaggtgaacatacctctgctggatgccatcaagcagattccaagatataccaagtttctaaaggagttatgcacccacaaaaggaagctcacaggcaataaaaggattagcatgggcagaaatgtgtcagcattgataggtaaatctgttcctcacattcctgagaaatgtaaggacccaggtactttttgtataccttgcattattgggaacagtataattgagaatgtcatgctagatctangagcatcagntagtgtcatgcctatgtccatttacaattctttatct

SEQ ID NO: 14574 - DNA, 375 bp, Glycine max
  unsure at all n locations
agcttcaactgtgaagctatcttcgtatctatcatggccaaatatgcatgacagtcggtttgcgctttacaagttgccattgcgggttcccaaagatgaccaagaatatgctggtttatggngaggaacttttggttggcctcctgganagccttctgaagacaagcctgganaggctntattctttcttctgctctcttatgaggagttccagggacaacagcttctcattgcaacaaaaattttggaaggcacacactatgtgttacatcctaacggttcagcaatgtttacagcanatatcaatgatccttcatccgaaccctttccctgggacactgatgcagactcngttccagtgaatatcaagcaagc

SEQ ID NO: 14575 - DNA, 393 bp, Glycine max
  unsure at all n locations
ctcagcttagaggttgcttgatgagctttacgacaagactgccattgtgtttgttaacaccaagaggaatgcggatcatgttgccaagagtttggataaggaagggtatcgcgtgactactttgcatggagggaagtcgcangagcagagggagattagtcttgaagggtttaggaccaagagatataatgttcttgttgctactgatgttgctggacgtgggattgacatacctgatgtggctcatgtcatcaactatgatatgcctgggaatattgaaatgtacacgcaccggattgtgcgtactggtcgtgcaggaaagacgggtgtggctaccacgttcttgactcttcaggactctgatgtcttctatgacctcaagcagatgcttat

SEQ ID NO: 14576 - DNA, 388 bp, Glycine max
ggggtacactaagaacacaaaccctatcctgaaatctcattactccattaggccccactctaaaactactctctctccctgtgactatggactctaactgggctgacaagaatgggtcagacttctgaccctcacggatctcgctcaagagttcgctggttactctcaacataccaaacttaatgctactagaggtgatctcacatgccaaactcatgtctctaaactgctctaagaggtctaactctctaaccatcaaagcagacatctgaagggatttcctactcaaggcatcagctactacattggctttacctgggtgatagctaagctcaaaattgtaatccttaaggaactctaaccatctcctctgcctcatgttaagctc

SEQ ID NO: 14577 - DNA, 313 bp, Glycine max
  unsure at all n locations
cgatccttaagtcacctgcggcatgcaagctntgacaatgcaatctttcccanaactttatcatggtcatgttctgagcctcccatttctgtgtgcaaagatctaagctgtttctcanagtcctttctaagatactctgctttgattctctggcgttgcgcttcatcttgcttttcccataactcatgtagttttagagcaaattcatgcatggcctctgccaccccagtttctgatattctactcattgcatgattccaatcattgcaaattataaaaactggtggggcatcaagctgacttggagagaaag

SEQ ID NO: 14578 - DNA, 393 bp, Glycine max
  unsure at all n locations
agctngaaggcaaactggatgcgttggtcttcttggttacccagctggccttgaatcagaaatatgtacctgtcgcaagggtttgtggtttgtgctcctctgctgaccaccatacagacctttgcccttccatgcagcaacctggagcaattgagcagcctgaagcttatgctgcanatatttaccatagacctcctcaacctcagcagcaaaatcaaccacagcagaacaattatgacctctccagcaacagatacaaccctgaatggaggaatcaccccaacctcagatggtccagccctcagcaacaacaatagcagcctgctccttccttccaaatgatgctggcccaagcagaccatacaattctncaccaatccaacaacatcaaca

SEQ ID NO: 14579 - DNA, 394 bp, Glycine max
  unsure at all n locations
ttaagtcacctgcggcatgccaagcttgaaggtgcgntagcccaccatttttcatagtataatactggtaatgtgtctactatcattatcattntttctccgtcattgaggtgccacttgagttgccaggtctctccacctttgggcgtattctttgaaatatctgtgcccctttttgcacatgttctgttgttgcatcctatccggaaccatatcaaaattgtactgatactgcctaatgaaggcaaccattatgtccttccaagagtggactcgagaaggttccaggttagtgtaccaggtaacagctaccccagtcagaatttcttggaaggaatgtatcagcagntcctcatcttttgcgcatgcccncatcttccgataatacatcttt

SEQ ID NO: 14580 - DNA, 442 bp, Glycine max
  unsure at all n locations
tgtgaagtgtgtggaattcctatagcaattcccttatgttatcaaacataaaaagggaaaaggtaatattgtagccgatgctctttctcggcgtcatgcattactttctatgcttgaaaaaaaattgattggtcttgaatgtttgaaaagcatgtatgaaaatgatgaaacttttggagaaatttttaaaaattgtgaaaaattttcagaaaatggtttctttagacatgaaggctttcttttcaaagaaaacaaattgtgtgtgcctaaatgttctactagaaatttgcttgtttgtgaagcacatgaaggaggtttaatggnngcatttggggtccaaaagactctagaagcattacaagaacaattntatatgcctcatatgagaaaggatgtgcagaaattttgtgaacattgcattgtatgtaaaaaggcaaagtct

SEQ ID NO: 14581 - DNA, 397 bp, Glycine max
  unsure at all n locations
gtgtgtcttgtgatgngagctgaaaaagactcttctttataggtgtgtaagctcgatcacaaaggatggcatggccactagctgccatgttttcaatcaactccgtaacttcatcaagtgtcttcaatttgatctttccaccagtggaagcatcaagtaattgcttcgaatggggtcgcaagtcatcaatgaatatatttaactgaatcgactcgctaaacccgtgggtaggagtcttccggagtaaaccatggaagtagtcaagagctttactaagtgattcatcggggaattgatggaataaagagatttccaccttcccctcagcggtcttggactctggaaaatatttctttaagaacttctccaccatctcttcttatatctgcaagttatt

SEQ ID NO: 14582 - DNA, 382 bp, Glycine max
  unsure at all n locations
ggcagcaagcttgagggttaaagtctcactatngtctcgtgttgatgcaacaattgttacccgtggctatacgagacatcttgccaaacaaagtcaggttagccataactcgtctgtgctttntcttacatgccatatgtagcaaagtcattgatcctgtcacagttgatgagctgcanaatgaggccgcacttatactgagcctagtggagatgtattttctacctgctctctttgacatcatgattcacttgattgtgcatctggtcagagaaatcaaatgttgtggtcctgattatttgcggcggatgtaccaagttgagcgatacatgatgatcttataagggtatacacagaatctatatcatctagaagcatctat

SEQ ID NO: 14583 - DNA, 358 bp, Glycine max
  unsure at all n locations
agctntgaggatattcanacgactttaactttttcactgatgncngannnagncccgtaatttatcgagactcacganatcgaatggtgaagctcagagcaaattcaaacgacaataactntttactcggatgtctgattgagtcccacaatatataaagacgctcgaaattgaatgttaaagttctgagcaaagtcaaacgacaataactnnttactcggatgtcggattgagtcatgtaatatatcgagatgctcgtaattgaataccgaagatctgagcatattcaaacgtcaataactntntacacggatgtgctgatgagtcccgtaatatatcgagccgctcgaaattgaat

SEQ ID NO: 14584 - DNA, 118 bp, Glycine max
  unsure at all n locations
gaactacttcacatggacttgatggtgcctatgcaagttgaaagccttggagganaaaggtatgcctatgttgttgtggatgatttctctagatatacctgggtcaactttattagag

SEQ ID NO: 14585 - DNA, 361 bp, Glycine max
  unsure at all n locations
agctngaaattgaacatcggatgctctcgataaaatcgagtggtcataaattttcacacagatgtccgattcggtgaaataatatatcgagacgcacgaaattgaacaacggaagctctcgagaaattcgaatggtcataacatttcactcggatgttcgatccggggacatatattatcgagacgctcgaaattgaacaaccgaagctctcgacaaattagaatggtcgtaactcttcacgcgaatgttcgattcggggacataactcatctagacgctcgaaattgaacaacggaagctctcgagaaatttgaatggtcataagttntcacacggatgtccgattcggaacataatata

SEQ ID NO: 14586 - DNA, 340 bp, Glycine max
  unsure at all n locations
agcttgtaaaatagatntagttattcactctacttgcaaaagagagagttctagctgtctaggaacttatacgttgatgaactttgtttaagataaattgaaaagtattcctagaagctatcttatgaaagatagacactccaaggtactttccaagatccttagtccaagcaatacccatttctccacttagttgatccttgacttgagtctccacatttttggaaaagaacattcaagatttctccaagcttaatttctgcttagaactcttgcaaaatagattcaaaatattcttgatagaatggacctgctccactaaagccttcataaataaaat

SEQ ID NO: 14587 - DNA, 457 bp, Glycine max
  unsure at all n locations
tatatctaatttatacgtgcatcttgattctaagggtggatgttaatagttacatgagaaataaagtatatgggttgatatttgtgtaggcagagaaagcaacggcaagaacagaagaggagagggtgatagcccatgagcacgcaaaggcaaaggaagctggagcaaagatggagctgcatgaagctaaagcaaggcatgcagcagagaagctaagcgccaaccaatcacattatggtctccaccatggccacaacaaccctcccttagtaggaacaactcagactcactaccagcaagggcaccagcaccagccacttggggcagttcctatgcctggaaccacttatccatcttatccactaggaggaaaccctaaccctccaaggaacaaacatatataatagatctatctgtgttntgctgtagtacgtctacttcttgtgttattactcct

SEQ ID NO: 14588 - DNA, 484 bp, Glycine max
  unsure at all n locations
ctcggcttctcctatntgtatctaagggtagcatatcatntttatgatgaattgcatctcttctcaagtccaggtgtgaatgagtatcagtgcacacatgacaaatgtattaagctggacatatatattgatgattgagtagtagctgaatttatgcagtgtataggagcctcaacaatggatgaatatacgaagcacattgaaaaggatccagctctggagaggcgattccagccagatgaaaccatacaaatactgaaaggacttagagaacgctatgaaattcaccacaagctccgttatacagatgtgcagttgtcacatttaaacgttctgctcccttttctgttcattttacctattctattcatttatgctggagatcagacaagtttctttatttcttataatatttatgtagctggaaatttttcaaatgtatattaatttatctctttgaattgtatacaatagttagattatt

SEQ ID NO: 14589 - DNA, 445 bp, Glycine max
  unsure at all n locations
atgagaaataactttgactcagatgtttgattgagtcccgtaatatatcgagacgctcgtaattgaaaacaaaagctctgagcaaattcaaacgacaataactttttactcggatgtccgattgagtcccgtaatatatcgagacgctcgtaattgaaaacagaagctctgagcaaattcaaacgacaataacttttaactcgggtgttcgattgtgtcccgtagtatatcgagacgctcgtaattgaaaagggaagctctgagaaaaatcaaacgacagtaacttttaactcggatgtccgatagagccccgcanaatatcgagacgctcganattgaaaacagaatctctgagcaaattcaaacgacaataactntngactcggatgtctcgatgtgtcccgtagtatatcgagacgctcagaattgaaaccgaagctctgag

SEQ ID NO: 14590 - DNA, 490 bp, Glycine max
ccttctattctcaatttcgagtgtctcgatatattactttactcaatcggacatccgagtaaaaacttattgtcgtttgaatttgcttagagcatatattctcaatttcgagtgtctcgatgtattacgtgactcaatcgaacatccgagtaaaatgttattgcagtttgcatttgcaacaagcttctgatttcaatttggatcgtctcgatctatgatgggactcaatcggacatccgagttaaaagttattgcggcttgcatttgctacgagcttccgctttcaactacgagcgtcttgatatattactggactcaatcgaacatcagaataaaaagttattgttgttagaatttttttcagagcctctgttttccattacgagcgtctcgatatattacgggactccatcagacattctaaaaaaaagttattgtcgtctgaatttgctcagagcttctgtctgcatattcgagcgtctcgatatat

SEQ ID NO: 14591 - DNA, 418 bp, Glycine max
  unsure at all n locations
gcatgcatctcatcanaataaaaaataaaaactgtttagttaaagggtactgcactntttttaatgagacaaaattcttttgcgacgtatgaattgaaacttgacatgacgtacgtgaatgtgataatcaggagagaggaagaattttgctgaaatgggcagagctaatagaggaaaacgcagaagaacttgcggcactagatgccattgatgcggngaagttgtaccatatgtgtaggaatttggaagttccagcagcagcaaacactcttcgttactatgcaggtgctgccgataagattcatggcgaggtgttgaaaatgtcccgagacttccatgcctatacattgcttgaaccacttggtgttgtgggacacattactccctggaatttccccaataccatgttctacatcaa

SEQ ID NO: 14592 - DNA, 484 bp, Glycine max
  unsure at all n locations
tctcgcttttcttgtttaattattatattttgtttttaagccttgtatttggctatgttttcatgacatttgaatacttagtatttcttttattacttgattagtataactgaatatgatgattatatttacttgctcttgggtgtttatggttatgaagttttaaacttaattattttgatgatatatgactagaggtatgcacttttatttggttattatgaatgactttctggataatatgatattctatgaagtattatctttctaagattgatgaatggttaagatatcttgtttgattgattttctattcttgtgtatgtcatttatgtatggnttttatatatatttgatctattcatgtttcttgcttcatgattggtttatatttttccatgactggtgtgtgaatgattagttgtatttgtatgtttcatactttgtacgcactttggcttttctgtgatgccaaagggggggg

SEQ ID NO: 14593 - DNA, 225 bp, Glycine max
gatgatttctctagaattacctgggtcaactttattagagaaaagtcagacacctttgaagtattcaaggagttgagtctaagacttcaaagagaaaaagactgtgtcatcaagagaatcacgagtgaccatggcagagaaattgaaacagcaggtttactgaattctgcacatctgaaggcatcactcatgagttctctgcagccattacaccacaacagaatg

SEQ ID NO: 14594 - DNA, 348 bp, Glycine max
agcttggatatcctttgctccggaaacctctcctttctcatgtgaacccaaacccaatctccaggatggaaaacaacctttctgcgcccctctgttgcttgtttagcataactctcattcctcttatcaatttgggccttgactctatcatggagccttttcacataatctgttttggcttgtccttccttatgcttaaaaactgaaatattacgcattggaaacaaatcaagaggagttagtggattgaaaccatacacaacctcaaaaggagaacaactagtggtgctatgcaccgccctattataagcaaattcaatgtgagggaagcaaactttccacatttta

SEQ ID NO: 14595 - DNA, 392 bp, Glycine max
acatactcctcatgcttctcaccatgtctaataaggttcgatttcttcgttctgcgacaccattctgatccggagaaccaggcatagtgtattgggcaacaatcccatgttcttgaagaaattccacaaatgaacctggtgcttgtccatcctctgtgtatctaccataatactccccacctctatctgatctcacgatcttacattgtttccacattgtttctcaacttcagcctcaaaaactttaaaggcatctaaagcttcattcttagaatgaagtaagtagagatacatatatcgtgaataatcatctataaaggttatgaagtatttcggactatttgcatctatgtctggacaacatatgtctgtatgtatgatttctaataaat

SEQ ID NO: 14596 - DNA, 421 bp, Glycine max
  unsure at all n locations
tctanactntgtacaagaatgaagctctgataccacttgttagacaagtggcctcagatatcttaagaagggggggttgaattaagatattccaaactgtttcccctaattaaaaatctatttcactttttactcaagttatgaattcccttaatgacaatcttcttaaatattaattcaaatgaagcaacttgaatatgaatataaagcaataataaataaaggagattaagggaagagaaaatgcaaactcagttttatactggttcggccacacccttgtgcctacgtccagtccccaagcaacccgcttgagagttccactatcttgtaaattccttttacaagttctaaacacacaaggacattccttcctttgtgtttagagatcctttacaacaagagactcacagtctcttaa

SEQ ID NO: 14597 - DNA, 455 bp, Glycine max
acactattaatgcattactgttaaatccaatatatataagtaaagtttatagattacgtactaagtttcagaaaataattatttattttttttaaaaaaaaattagtaagcatactttttcattctgaaaaagataattcagaattaaaaaccttcgttttggattaccttttctgaattgatcaaaaggagtggtgactgataataaacttctggactaaaatttctataaagttatttatattaataacatatttgtaaatctcattaagattttatttatatttcttaattttctcattactaaatattataaatcatgtataaataatattgaatataccaataaaataaagattgaaataaaacactttttaagagaacaaaatatttaagtaaaattctttttttttctatacgtaccatagacttattattaagaataataaatctag

SEQ ID NO: 14598 - DNA, 423 bp, Glycine max
  unsure at all n locations
ctaagctgaattgacaacggagcttcagagattcaatggtcatacttatacacggaagtccgattcaggcgcataatatatctagacagtcgaaattgaacaacggaagctctcgagatattcaaatggtcataacttatcacacggatgtccgattcatgcgcataatatatcgagacgctcgaaattgaacaacggatgctctcaagaaattcaaatggtcataacttatcacacggaagttcgattcagacgcataatatatcgagaagcttgaaatngaacaacggaagctgtcgataaattcaaatggtcataacttatcacacggaagtccgattcaggcgcataatatatcgagaagctcgaaattgaacaacggaagccgtcgagaaaatcaaatggtcataacttatgacacag

SEQ ID NO: 14599 - DNA, 121 bp, Glycine max
tcataacttatcacacggacgtctgattcagccgcataatatatcgagaagctgagaattgaacaaccgaagctctcgaaaaactaaaatggtcataacttttcacacggaagtccgattt

SEQ ID NO: 14600 - DNA, 487 bp, Glycine max
  unsure at all n locations
ntaatntatcgtggctganattgagtntacaatccaaagttctaagtattaacaaaggaaattgtggccaataaatttaagggataaatgatcatttgattctagatgtataaattggtgacatttgaattcttataaaaaatgaaaattgtgattttcatccttatgtaaaaaaatgtgacaattatattttatcatacaacttaattaataacaaattatattaatattttaattntataatttaatgtcaaattaatcataaaaaatataacttaatctcaaacttgtcccataaaatttagctacaggacatttgttaaaaattttatacatttaaggattaaatcaatttttgttttctttcaacacctaatggttaccaatttacactctcaagaatcanatcgtttatcctaattataagtataagtataacaataaaaataattaatacgtatattaggcacccatgatanattaatac

SEQ ID NO: 14601 - DNA, 412 bp, Glycine max
  unsure at all n locations
cgacaataactntntactcggatgtctgattgagtcccgaaatatatcgagacgctcgaaattgaataccgaagcgctaagcaaattcaaacgacaaaaactttttactcggatgtctgattgagtcccgtaatatatcgaaaagctcgaatgtgaatgtagaagctctgagcaaattcaaacaacaataactttntactcggatgtctgattgagtcccgtaatatatcgagatgctcgaaatggaataccgaagctcggagcaaattcaaacaataataactnnttactcggatgtccgattgagtcccgtaatatatcggaacgctcgaaattgaatgtagaagctctgagcaaattcaaacgacaataactttttactcggatgtctgattgagtcccgcaatatatc

SEQ ID NO: 14602 - DNA, 367 bp, Glycine max
atccttaagtcacctgcggcatgcagctatcactcggagatctgattcatgctcattatatatcgagacgcttgaaaatgaacaacggtagctctctagacattccaatgctcattacccttaactcggagggtcgatttatgcgcctaatatattcagacgctcgcaattgaacaacggaagctttctatatattcaaatggacataactttctactccgaggttcgattcaagtgcatgatttattcagacgctcgaaattgaacaatagaaactcttcagaaattcaaatgggcataatcctaaactcggaggtcccgattaagcgcatactaatcgagacgctcgaatttacaatggagctct

SEQ ID NO: 14603 - DNA, 389 bp, Glycine max
  unsure at all n locations
ctgcagctggcatcatccttgtaggattcccaatgttctaaaactggactgattcatttgcttccaaagattcatggccttgcaagtgaagacccgcacaaacatttgaaagaatttcacattgtctgctccaccatgaaagccccagatgtccaagaggatcacatatttctgaaggctcttcctcattcattagagggagtggcaaaggactggctgtattaccttgctccaaggtccatcacgagctgggatgaccttaagagagtattcttagaaaaaattttccctgcttgcaggaccacaaccatcaagaaggatatctcangtattatacaactcagtggagagagcctgtatgagtactgtgagaagatttaaaaactatg

SEQ ID NO: 14604 - DNA, 450 bp, Glycine max
  unsure at all n locations
gtcagtttagtcaaaggtaaagctaactatgagaaaccttctatgaatctcaggtagtatcctgctaagcccaaaaatctcctaatctcaaaaatagatttaggactctcccattcaagaacgacttctatcttagagggatctacaactatacccccttgagatatcacataccctaggaaactaactttctctaaccaaaactcacactttgacaagttagcataaagttgtcggtccctaagggtatgtagcacaatcctgaagtgttcttcatgttcctctctagtcttggagtataccaaaatatcatctatgaatactaccacaaaactatctatgtaagggtgaaagactttattcatgaagtatataaacacacctggagcattagccacaccanaaggcatgactagatactcatagtgaccattaacgggtcctaaagca

SEQ ID NO: 14605 - DNA, 430 bp, Glycine max
  unsure at all n locations
atattaccataatctcanaaaaaggggagtagtgagtagttattgcaagaagaaaaaaatgttgatttcaattgtattctttaaataacaagtaataaatgccatgtaatcaacgtttcagatcaaatcaatcaaatgttgtttttcctctangtttattatctctatctatcaatcacctcttgcaaatttatatttttgtgatgatgttattattatgacgtgacacatctaattgtgtcattatttgtatatgtagtgcttgatgatttcatcaaattgtgacatcattattctaaaatatgctcatcattaatgaaatattttttcaaaaaatatatatattatagggacgataaacatacaagactaaagcttaacttaatatataacgattacaaaattatttaaatctttttttatatatata

SEQ ID NO: 14606 - DNA, 351 bp, Glycine max
  unsure at all n locations
atggtccatttcaagtacatgttatgattatttacattgcacacaagattgaattgcctggtgagtataatgtgagtactacatttaatgtgtctgacttaactctttntgatgtagatggagaagccgatttgaggacaaatccttntgaagagggagagagtgatgaggacatatcaaggactaatggcaatgaacctttataatgacttggaggacctgtgccaagggctagaacaaagaaggccaaggaagctcttcaacaagtgttaaccatgctatttgaatttaggcccaagttacaagtggagaatgttcggattgtcaattgtaccatgttccaagaagtgt

SEQ ID NO: 14607 - DNA, 487 bp, Glycine max
  unsure at all n locations
ctttgtggagagggacgtgactgttaatcaattggacagtatagtatgaaacattactgcctgcaataatttaagttttagtgatgaagagcttcctgaggaggggaggaaccacaatctggcgttacatatatcggtgaactgcaagtcagatgctctgtcgaatgtacttgtggacactggttcctcattgaatgtaatggccaaatccacattagatcaactttcctaccaggggccccccatgagaagaagcggngtggttgtcaaagcgtttgatggatcaagaaagtccgttatcggggaggtcgatttgcccattacaattgggccgtttgttttccaaattacattccaggtgatggatatccaagccgcatacagttgccttttgggtaggccgtggatccatgaagcggnggccgtgacatccaccttgcatcanaaagctgaagttgtcagaaatgggagattgatcactgtgagt

SEQ ID NO: 14608 - DNA, 235 bp, Glycine max
aattaatccaatttggcatggcgaagtatggagatccgggatgttgagacgtccaagcaccaaaaacctttgtgcatactgctatatccaaaaaagaaacatggaatactccgtggtgataatttatgaggagcataatctcgcaaaccagggataacccgacacccaatgggtgaaagtgagcataatttggagaaacatcatgtaagagctcaaaaggagatataccttttaa

SEQ ID NO: 14609 - DNA, 454 bp, Glycine max
  unsure at all n locations
gacaattgaagagtctatacatgtttcctttgatgagtctaatgccattcttccaaggaaggattttttagatgatatttcaaattccttagaagatacacatattcatggaaatgactctaaagaaaaagatgaaggaagcaatgaggattctcaagataatggagttagagcacataatgaaccttcaagagaatggagagcctcaagagatcttcccctcgacaacattattggtgatatatcaaaaggggtaacaactagacattctcttaaatatttttgcaacaatatggcttttgtatttatgattgaacctaanaatataaaacaagccatagtagatgataactagatcattgccatgcaagaagaactgaatcaatttgaaagaaacaatgtgtggaaactagtagaanaacctaaaaattatcctgtcatatgaacaaaatgg

SEQ ID NO: 14610 - DNA, 293 bp, Glycine max
  unsure at all n locations
atatgaaccctgctatataattcaagtggtctaaaaatccttggacttgcttttcagtgcgcgactcggcatttaaggatggctttcaccttgtcggggaccacctctatccctttctggcttacgatgaaaccgagtaattctcccgacttgaccccaanagtgcactaggcgggacttattcttaactaatactatcgtagtctctcgaacaactagttttagacttgccaatcatgtcagcacatagacttaatttctttgcgcatcatatcatggaataatgctaccat

SEQ ID NO: 14611 - DNA, 397 bp, Glycine max
taacaaaaggcatgtgaagtgggtggaattcctagagcatttcccttatgttatcaaacataaaaagggaaaaggtaatattgtagccgatgctctttctcggcgtcatgcattactttctatgcttgaaaaaaaattgattggtcttgaatgtttgaaaagcatgtatgaaaatgatgaaacttttggagaaatttttaaaaattgtgaaaaattttcagaaaatggtttctttagacatgaaggctttcttttcaaagaaaacaaattgtgtgtgcctaaatgttctactagaaatttgcttgtttgtgaagcacatgaaggaggtttaatggggcattttggggtccaaaagactctagaagcattacaagaacaattttatatgcctcatatg

SEQ ID NO: 14612 - DNA, 377 bp, Glycine max
tctggctgcttattgcaggttgacaaagttagtgatccccagaaactcaggctagaagctgaaaaaagagatgatgttgtatgcatatctgctttaagaggtaatggctcgcaagaattttgaaatgcagttcaagacaagctaaaggtgcaaagttgaaaccaatctggatgtcaatttaaatataccattgtactatttgatatcgaataacccgtttgtttgaactacgaactatttacatttgttaaatcaaaattctattattcattaacaggactccatggtttgggtggaagctctggtcccatttgaatatggtgaccttctcagcaccatacatcaagttggaatgggtgatgaaactgtgagtatac

SEQ ID NO: 14613 - DNA, 378 bp, Glycine max
gtctcacgattgtcacgtgctcatcctttaattgttagcccgggctatacgagacatcttgccaaacaaagtcaggttcacgataactcgcctgtgctttttcttccatgctatatgtagcaaagtgattgatccagtaatgtttgatgagttggaaaatgaggccgcaattatactgtgccagctggagatgtatcttccccctgctttctttgacatcatgattcacttgattgtgcatctggtcagagaaatcaaatgttgtggtcctgtttatctatggaggatgtacccggttgagcgatacatgaagatcttaagagggtatacaaagaatctatatcgtgcggaagcatctattgttgagaggtacattgc

SEQ ID NO: 14614 - DNA, 418 bp, Glycine max
  unsure at all n locations
tgaggacacatgaacganaacgcaattcatggggctctgtanatgataagtatggagaattgcactaaccaatcactacgcatggctccaaactcaaaggtggaggactcatgaacgaaaactcaattcatgggctccgaaaaagggttgagaatggagaattgcactaagcaatcactacccatagctccaaactcgaaggtggaggacacatgaacgaaaacgcaattcatgggtctccgaaaaaggttgagaatggagaattgcacttagcgatcactacgcatagctccaaactcgaaggtggaggacacatgaatgaaaacgaaattcatggtgctccgaaaggattgagaatggagaattcaactaagcaatcactacgcatggctccaaactcgaaggtggaggacacatg

SEQ ID NO: 14615 - DNA, 428 bp, Glycine max
  unsure at all n locations
ntgagataattcanacgacaataactntgtactcggatgtctgattgagtcccgaaatatatcgagacgctcgaaattgaataccgaagcgctgagcaaattcaaacgacaaaaactttttactcggatgtctgattgagtcccgtaatatatcgaaaagctcgaatgtgaatgtggaagctctgagcaaattcaaacaacaataacnttttactcggatgtctgattgagtcccgtaatatatcgagatgctcgaaatggaatagcgaagctcggagcaaattcaaacaataataactntttactcggatgtccgattgagtcccgtaatatatcggaacgctcgacattgaatgtagaagctctgagcatattcaaactacaataactttttactcggatgtctgattgagtcccgtaatatatcg

SEQ ID NO: 14616 - DNA, 417 bp, Glycine max
  unsure at all n locations
ggctccaaacccgatgccataatctatgtgtttntgggagtctatgttatccatggctacgcccttactcaaatagaagcatgccatgtgtgtttctaggtccctctccccaacaccatgcatacgaatgctatcatattctaactcanaaaatatacctctctagacatgttgtctttcatgaatcaatcttcccctcactacgcctcatttggtccctaccttcccaacctcaaaccatgatatgaccttacttatctcttgccatcctctcatactacaacaactccatacaaacatgccccctaaatactccaccaatcactcctcanaactccaatgcatccttccccaccccttctatatctacaaatctaccacaaacacctacatcatccacacctttggctgatctaa

SEQ ID NO: 14617 - DNA, 387 bp, Glycine max
  unsure at all n locations
gccgatgctctttctcggcgtcatgcattactttctatgctngaaacannaatgattggtcttgaatgtttgaaaagcatgtatganaatgatgaaacttttggagaaatttttaaaaattgtgaaaatttttcagaaaatggtttctttagacatgaaggctntcttttcaaagaaaacaagttgtgtgtgcctaaatgttctactagaaattttcttgtttgtgaagcacatgaaggaggtttaatggggcattttggggtccaaaagactctagaaacattacaagaacatttntattggcctcatatganaaaggaagtgcagaaattttgtgaacattgcattgtatgtaaaaaggcaaagtctaaggtaaagcctcatgga

SEQ ID NO: 14618 - DNA, 429 bp, Glycine max
  unsure at all n locations
ctaagctctcgatatatatgcacatgaatagacttcgtngttattatgacattgaattctcagagcttcgttgttcattntgagcgtctcgatatattatgcaccagaatcggactttcgtgtgacaagttatgaccatttgaatttctcgagagcattcggtgttaatttcgagcgtctggatatattatgcgcctgaatcagacctccgtgtgacaagttatgaccatttgaatttctcgagagcttccggtgttcaatttagagcgtctcgatatgtgatgcgccagaatcggactttcgtgtgacaagttattaccatttgaatttctcgtgagcattcgttgttcaatttcgagcgtctcgatatattatgcgcctgaatcggacattcgtgtgacaagttatgaccatttgatttctcgagag

SEQ ID NO: 14619 - DNA, 442 bp, Glycine max
  unsure at all n locations
caataaagnaagagcacgcctagtaacaagcacatctccatttaaaggttcagcaacatcaacatcactacaatcctccaatggcagcatttcatcatcacttgagctctcgttctctatgtctccattatccagcaatatcatgaatcttttatttcgacattgagaagcaatatgtccaactccttgacacctaaaacattctatatcacaagatctagaagatgaattaatttctattttacctttatgtgcaacaaatgaatttttggacatagcttcatctgttgactntgtcattgatttgttgtttcaccaatttgacttccatgaagaagtggaagcaacattggaagtactcttagctgtcaatngcctctctacttgaataaatntgtgcagcaagtccctcatctcaacataatgttgcaagtctatcaca

SEQ ID NO: 14620 - DNA, 351 bp, Glycine max
  unsure at all n locations
tctgnacctgtcgcaagggtttgtggtttgtgttcctctgctgaccaccatacagacctttgcccttccatgcagcaaactggagcaattgagcagcctgaagcttatgctgcaaatatttacaatagacctcctcaacctcagcagcaaaatcaaccacagcagaacaattatgacctttccagcaacagatacaaccctggatggaggaatcaccctaacctcagatggtctagccctcagcaacaacagcagcctgctccttccttccaaaatgctgctggcccaagcagaccatacattcatccaccaatccaacaacagcaaaaacccagaaacagccaacagttg

SEQ ID NO: 14621 - DNA, 381 bp, Glycine max
  unsure at all n locations
taacagaagctctcgagaaattcgaatggtcataacttttcacacggatgtccgattccggcgcataatatgtcgagacgctcgaaattgaacaacggaagctctcgagaaattctaatggtcataacttttcactcggaggaccgattcaggcgcataatatatcgagacgctcgaaattgaacaacggaagctcccgagaaattcaaatggtcataactnttaactcagaggtccgattcaggcgcataatatatcgagacgctcgaaattgaacatcgaaagctctctagaaattcaaatggtcataacttttcacttggaggtccgattcacgcgcataatatatcgagacgctcgatattgaacaacagaagctct

SEQ ID NO: 14622 - DNA, 456 bp, Glycine max
  unsure at all n locations
tgatctgttaagttatcttatttagccattgtctaatagcttgagcactttacacgaggcacgttactgtgcagagaaagagtgtgacgaccacaaacattttctatagcaaatcttcaaagaagtacaacttgtcagagtcgctaatgcaatccttcctcccaagggcattggatagaagactccaagaagattgggctagagatgcaacagaaggccctagggttctcataagccttagggtagattttggacccatgggctaagtatgagctcacttatctttgtacatattagattaatgtttcattattttttggccttgtatttagggccccataatgtaggtagggtaccttaaaattctaggatttttcagcccttgtattntagggcacctagactaggtttttgtattaagggtagttttgtaatttcacatgcattaagtgaata

SEQ ID NO: 14623 - DNA, 328 bp, Glycine max
  unsure at all n locations
tcttatggcttccacgagtttcatgatggtatcagagctcttcaactgaagagcttttgtgtacaactcgatctatcttccttcttcttcgttntcatgattttcaactagtgttgtgtcgcatatcctattgtgttcatcatgagtgcaacacaggttcaagatcaagcatcttatgtgcatagcccgtattaccttcattcaacttggaaaaggtgcaacaatatggttgtgtcatggcttgtacactcagtttcaccttcaatactacagagtatattgtggatggacaatgctcatgatatatggaaagaattgaagtcatgat

SEQ ID NO: 14624 - DNA, 306 bp, Glycine max
  unsure at all n locations
gatgaacaacgtttggtggaggtttaggtgcangattatgaaattntgacttcaactcaacaaccattatggttaggatgtaaaaatacatcaaagttgtttgttgttgttcagatgttgagcaaaaaatttacacataacatgtcacangcctgcgtcaatgatgtgatgattttttttaaagagtcaaaccaaattgagaatgtcattccttctagtttcaagaaagcaaatatacttgtagtagggctaggtttatcgagtataaaaatagattgttgcattgatgggtgtatgttgtattac

SEQ ID NO: 14625 - DNA, 424 bp, Glycine max
  unsure at all n locations
tactcagcttacgcaatgcactctactcagttttataggatttgctaacaattaaacataagtatattcaccaggaaaacattgttgtggaaggaaattgtagtgttgcgattcanaagatcctgccacccaagcataaagaccttgggagtgtaacaattccttgttcaattggagaagtcactgtgggaaagacttttattgatctgggaaccagtattaacttaatgccactctccatgtgcagaaggttgggagagttggagatcatgcccactangatgaccttacaacttgttgaccactccattacgagaccatatggagtaattgaagatgtgttggtcagagtaaaacattntatctttntggcagactntatggtaatggatatctgtgaagataatgacattcctgtaatatt

SEQ ID NO: 14626 - DNA, 483 bp, Glycine max
  unsure at all n locations
agctggtatctccttcttcactacatcaagaatcaccgggttgatgtcttctctgtggctgtcttactggtttagctccatcctctaaatntattcgatgcatacatgtggatgggctaatactangaatgtccgccagggtccagcctatagccttcttatgcttcttgagaactgacaacaacttctcctcttgctcatcagcaagggaggcagatataatcactggaaaactcttgctatcatccaagtaagcgtattttaaatttgatggcagaggcttcaattctggtgtggtcggctggacagtggtagaaggagatggtttctcagcctttacctcataaagaaagtcagaggtatgtgtacttcctgaaacatggttagtcctatctgattctattaaatcaatctcaagaggtaaaacaccaccaccangcatgcaatcaatatcactctcagattcactctcagcatcaaatt

SEQ ID NO: 14627 - DNA, 372 bp, Glycine max
  unsure at all n locations
actcggatgtttgattgagtcccgccatatatcgagacgctcgaaattgaatgttgaagctctgagccaattcangcgacaatatctttttactcggatgtctgattgagttctgtaatatatcgagacgctcgaaattgaatgttgaacctctgagcaaattcaaacgacaataacttttttctcggatgtctgattgagtcctgtcatatatcgagacgctcgaaattgaatgttgaagctctgagccaattcaaacgacaataactntntactcggatgtctgattgagtcctgtcatatatcgagacgctcganattgaatgttgaagctctgagccaattcaaacgacaataactctntactcggat

SEQ ID NO: 14628 - DNA, 465 bp, Glycine max
  unsure at all n locations
taagctccttcaactgcacaatgttcttaatattngaagagtatccttgtggaaccttcacccgacgaagacactgacaaaaacttatcttctccttcttggacaaagtatggcaggctgggggcaagtaaattttcttcccatcagaccttggatgcaactgtgatcttatacccatatcagctagatcttgacgggtattcaagccatccttcgtcttgccttgaatgttaaggagcgtcccaatcacactgtcacaaacatttttctccacatgcataacatcaatacaatgtctaacgtcaagatcacaccagtacggaagatcaaagaanatggacctcttcttccatatgcaactctgacttttatccttcttttgggtcttcccaaatacagtgttcaggtgttgaacccgctgatatacctgctcactagtgaacggtatcngcgcaatatcatgct

SEQ ID NO: 14629 - DNA, 391 bp, Glycine max
  unsure at all n locations
ctttatagaaacaagccgagccgagccttacataggccgagccaaagaccctcgacaagcaggtcgactcatttccacccctatctgtaatcatacctactaaataattagattataagtgaatattataattataatcataactaatttttaaaaaatggatacaatttgatataactagttattgtttttaaaatatgaatatataattaattatgaataaactagttatataacaactatataacaagttgcatctaanaccaattaaatagttatgaatgaatacaaataagttatttgaaatactcatttctataaaattagttatagttntataactataattatttntaaataagaatgagttatttacaatactcattaccat

SEQ ID NO: 14630 - DNA, 351 bp, Glycine max
agcatggatccacccaccagcttcttcgcccaatgcaccatgctcctggagtaactcgatggcgaccgcggtggaggatcctttcatcaatcatcgccagcacacgattattaagttgaaactgtcttgcaaaagcagccccactttttgccatgtgattgtaaacagaggcgttaaagaagtgaggctccatctttggaggattgtcccagatcatatatcgtaagtcaccatttactgttgtgttcttaaattctggcgcattgcaaacgactgagtgaaagtagccttcttgagataacttcacatttgtaaaatacatcagtagggtccgaggtaaattgtcccaac

SEQ ID NO: 14631 - DNA, 352 bp, Glycine max
ctgcagctggattcctttagtagggaatctattcttctattatgtgaccaaacccagtcaccttcattaagaactagctcttttcttcctctattgcctttagttgaacacacctttgtttggttctctatttggttcttaaccctctcatgcaacttctttacaaactcttacctagaatccccttctttatgtataaaagaagtgtccagtgggaggggaatgaggtctaacggtgttaggggattgaacccatagacaacctcaaaaggggactgcttggtggttctatgaacaccccttgttgtaagcaaattctacatgaggaagatactcatcccaagacttatgg

SEQ ID NO: 14632 - DNA, 325 bp, Glycine max
  unsure at all n locations
tagccaccaaagcatgccaaaaatntccttggcactatctttcttgctacgaaactntgaagcagnctcctctaggtcgataaattcttcccttctctgagcctcaacaattgcttttttctcttctgctaaccggnggatttcagcaattttattcttcattctttcaacatattcggccttctttntttccatgctttcctgataaaagaatttcttttttaaagtaacatacagctaatttataaaaccaatcatattgatgcattaattgaacataagtctggtgacacaaagaagatccaattctcttgccaattgtcat

SEQ ID NO: 14633 - DNA, 417 bp, Glycine max
  unsure at all n locations
tctatagaaggttcgttcctaatntctctacaatggcatcacctctattgatctggtgaagaagaatgtggcatttatctggggtgaaaaacaagagcaagcctttgctttgctcanagaaaagcttactaagacacctgttctagctcttcctaacttttctaaaacttttgagctagaatgtgatgcctctggagtgggagttggagctgtattgttacaaggtgggtaccctattgcttattttagtgaaaaacttcatagtgccaccctcaactaccccatctatgataaagagctntatgccttaataagagccctccaaacttgggaacattaccttgtttccatggaatttgtcattcatagtgatcatcaatcacttaagtacattagagggaaaaacaagttaaacaa

SEQ ID NO: 14634 - DNA, 438 bp, Glycine max
  unsure at all n locations
agctntctattcatacctagaaatccaagtttgctctntattttatgaagtttatgggattaagatggtcattgaccaatccctattctatgatttaacccaattgccaagtgaagatgtaccatttgaaggtacattgattgatgattggaagtttgatttttctgtgcatgatgcccgccggttggtttgcaccaaccaagcggatatgaccggaaggcttcttgccggttcattggcttttgaaagctgcatccttcattatctaattgttcgcatcttgcttccaagatcttcaaaccttgcacaggtttctgaagaagatcttattgttatgtgggcttttcataaaggcctacaaattgattgggcacatcttgttagatatcgcatgcataaggcattgcgattgaatgctccattgccatatccacacct

SEQ ID NO: 14635 - DNA, 386 bp, Glycine max
agctggagttgctgcacatgatgtccaacgttatgtcaaggaataagatcgggctgcacaatgcacaaggcaagttaaaatgtcaaatgaagaattgaagctgcaggatccacgatgtcggatacaatgtccaggacatcctgcccgaaaatactggagttgctgcacaatgcacaaaagctgcaggatccacgatgtcggatacgatgtccaggacatctggcccgaaaatactggacacataaatctgttatctctttaacagattattgtgcagttagcaagagataagatgatctatctttatgaacgaattaaaagataattaaagttcgaattacaaactagaagagttcgttcagggattaaagattaaagattaaaga

SEQ ID NO: 14636 - DNA, 400 bp, Glycine max
  unsure at all n locations
ctataaaactcagcttgatgcctattcaatggagtgcaagttcncttagattgatcacactgcacagnggcaaagatgcatgggagatcctgaaatcactcatgaaggaacctccaaagtgaagatttccagattgcaactcttggctacaaaattcgaaaatctgaagatgaaggaggaagagtgtattcatgacttccacatgaacattcttgaaattgccaatgcttgcactgccttgggagagaggataacagatgaaaagctggtaagaaagatcctcagatccttgcctaagagatttgacatgaaagtcactgcaatagaggaggcccaagacatttgcaacatgagagtagatgaactcattggttctcttcatacctttgagctaggactc

SEQ ID NO: 14637 - DNA, 327 bp, Glycine max
cttggacttgagcggcaatggatttcttggagaaggtatgtcaattccttctttccttgggacaatgacttccttgactcacctcgacctctctcatactggattctatgggatgattcctcctcagattgggaatctctcaaatttggtgtatcttgacctgagttcagatgttgccaacggaacagtaccttctcagatcgggaatctctctaagcttcgatatcttgacttgagcgacaattattttgaaggtatggcaattccttctttcctttgtgcaatgacctccttgactcacctcgacctctctgatactccattcat

SEQ ID NO: 14638 - DNA, 428 bp, Glycine max
  unsure at all n locations
gcagctggcctttacgttggacatatttgttcttatatatccaaacactcttatgtgctntgctgaaggctncttcccattccaagcttcaattggagtcttgtcttttacatacttagttggacatctgttgagtatgtaaacagcagtgtagactgcttcagcccagaatgtgttaggtagtcccttctccttgagcatcgatctagccatttccataactgtgcaattctttctctcagaaactccattttgttgaggagaatatgagactataagttgtcgctcaatgccttcatcctcacaaaatctttcaaactcgcgagaggtgtactctttgccgcgatcacttcttagtacttttattcattttccactttgatttcaagcagggccttgaacttttgaatactccaaagacttttgat

SEQ ID NO: 14639 - DNA, 424 bp, Glycine max
  unsure at all n locations
cacaagcattaccttaatgaanaatatgagtaattttatatctcttgattaaaaacggaccaaggcactgatctcgggtgtccaatttacattgaacgacttgngaaagcacatccaagcaagctaagtatgtatttcacaacgataattcgatatttgaaatacttcatcgaggagtttgagagtgccctgtaggagaaatttctagtatgacccattgaagcaaattgacaaatttcttcaaagtaacaatagctccaattatattacaagtcatacaaatatctcctatatggcaagtctatttgaatgtgtactctatctcttcctgttaatgccatgaggagttattatcaagttagtatatgtttgaataagcttatataanaacactctatagacaantttcttttaaaaaaaatat

SEQ ID NO: 14640 - DNA, 495 bp, Glycine max
  unsure at all n locations
ttcaaactaagctttcttgcgggtgatgggtntatcgcacagaaaggtttattattgtctgacatattctcaattagctcaattgcttctttcggngtctttagctctattttccccctacagaagcatctagtagttgcttggtttgtggtcttagtccatctatgaacatattcaattggattggcttggacaacccatgggtgggagttcttctcaataaacctctaaacctctccaatgtttcactcagacattcatcatagaactgatgaaattaagagattgtagctttcccttccacattcttggactttgggaagtatttctttagaaacttttcaacaacttcttcccaggttttcagactgttacccttaaacgagtgaagccacctcttggcctctcctgccaatgagaatgagaataggctgagtcttatagcttcatctggcacactagcaatcttaacagtgttgcatatttcgataaaag

SEQ ID NO: 14641 - DNA, 370 bp, Glycine max
  unsure at all n locations
agcttgtctctcanatcattggtacaacaatgattcctgttcttggtcatgctggtaatatatgatttacatttcctatttttgattaatattacaaagtaggaatttataaaattgttatttttgtcatgcagatggaatatgtcatgtatatgtagacaaaacagctaatattgatatggcaaagaagattattagggatgcaaagattgattaccctgcagcctgcaatgcaatggtaatttcagtttacatacccaggaatgcctcctctaatgcatgttcatttacatccatatcttcgtttgagttntcttcatttntcattcnattatgtaaatgaatctacagactcagctcattacaatat

SEQ ID NO: 14642 - DNA, 221 bp, Glycine max
  unsure at all n locations
tcacctggntcaagcatgactttctttctgcttttgttggcttgccttgcatagctcgcatttttcttttcaatttgggccttcacttgctcatgcaacttcttcacatactcagctttagcctgtgcatccttatgcttaaacatagcaatgttaggcataggcaacaaatcaagaggagtcaaaggattaaatccatacactatctcaaatggtgaaca

SEQ ID NO: 14643 - DNA, 376 bp, Glycine max
  unsure at all n locations
aaccacaacagaacaatgatgacctctctagcaaaagatacaaccctggatggaggagacaccctaatctcagatggtctagccctcagcaacaacaacagcagcctgctccttccttccaaaatgctactggcccaagtagaccatacattcctccaccaatccaacaacaacaacagccccagaaccagccaacagttgaggctcctccgcaaccttccctcgaagaacttgtgaggcagatgaccatgcagaacatgtagtntcaacaagagaccagagtctccattcagagcttaaccaatcagatgggacaattggctacacaattaaatcaacataagtcccataattctgacaagctgtcttctcaatc

SEQ ID NO: 14644 - DNA, 350 bp, Glycine max
  unsure at all n locations
gacacatagaaactaagcttgatgcacattgnagaggttatgaaacaacgtttatttctttccttgagaggtgaatcaaaggagntagagatcataatgaagaacaaggaggagaagagggaatgatggtgttcctagacaaaaccgaattgatggtattaaactcaacattcctccatttaaaggaaagaatgatccagaggcctacttggagtgggagatgaaaatagagcattatttctcatgcgacaactatgaggaggaccaaaaggtgaagcttgccgccacgaagttttctgactatgctcttgtgtggtggaacaagctacgcaacgagagagccagaaatg

SEQ ID NO: 14645 - DNA, 371 bp, Glycine max
  unsure at all n locations
agcnttgatggtccgnaatgtatttaaaggtgagttcgaggaggnaaaggcgccattgacgcacggcggcggcaatggcgtgaagctcacgcacataagttgaggaacactgaagcttgtggcaaaaaatcttactgaaaaacgcaatgggatgagcgttttgagaaagcatagctcccatagcgagaccagaagcatccgtctcgacgtcgaaggggatagtgaaatccggcggaacgagaacggtggcggtggtcatcacctgcttgagtttgaagaaagcagattgagcatcatcatcccaatgaaagttatccttgcgaagcagggaagtcaatggngcatccaagagcgcgtaaccgcgtatgaaa

SEQ ID NO: 14646 - DNA, 380 bp, Glycine max
ttcatgttgacaatgtacaaatccaaaaataattgataaacacaaatcattattgaatttcaaatcgctaaagttcgaagtataacaaaagaaaataaaaagagcataatattaaaaaatgtatggattaggtcctcagccctaaagcttacaaatctattttaagtccaagcccataaatgaaaaaatataatttggacaaaataagataaaattggatgaaatagaatctagatgaaataaaatctagatggaataaagtctggataaaataaaatctagatggaatataatctggataaaataagattcgataaaataaagttattattatcgctagttaaacaggtcggcttgtcaagctaacaagcattttttat

SEQ ID NO: 14647 - DNA, 439 bp, Glycine max
  unsure at all n locations
tcggtattccatttcgagcgttcggatatattacgggactcanctgatattctagtaaaaagntattggcggttgaatttgcttagagcttcggtattccatttcgagcgttcggatatattacgggactcaatcagacatccgagtaaaaagtttttgtcgtttgaatttgctcagagtttcggtattccatttcgagcgtctcgatatattacgggactcactcagacatccgagtaaaaatttaatgtcgttcgaatttgctcagagcttcaacattcaatttcgagcgtttcgatatattacgggagtcaatcgaacatacgagtagaaacatgttgtcgnttgaatttgctcagagcttcggtattcccatttgagcgttcggatatattacaagactcaatcagacatccgagtaaaaagttttggtcgttga

SEQ ID NO: 14648 - DNA, 354 bp, Glycine max
ttaagctgcagatagagaatacgtcttgtgcttatccattctgattgcttcttttctgtcagtgcatgataaaagtgagcaacttgaaaaggaagtgtcaactcttcagtccgagttggataggatatgctacttgctgaagattgctgacccaacaggagaagctgccaagaaaagggagttgaaagtacatgaacccaaaccaaaaaaatctgaagtaaccattaccatcaagaagaaaccacctgcagaagcacagaatagcagcgggccttgtgcaaaagcagataacaagaatcctcctgtggaaaccctgaaaatccgcgagacccctgtcaaggaagatggctctat

SEQ ID NO: 14649 - DNA, 422 bp, Glycine max
  unsure at all n locations
agcttcttagtttcagaagattcagntgtgtttgtatctacctcatgcactcctctaatgactatagcatcatttctggcactaaactgctgggagttggaagccatcttctcaattaaatttctggcttcagcaggagtcatgtctccaagggctccaccactgacagcatctatcatacatctctccatattacggagtccttcataaaaatattggagaagaagctgctccgaaatctaatggtgagggcaactggcacatagtttttttaatctctcccagtattcatataggctctctccattgagttgtctaatacctgagatatccttcctgatggctgtggtcctggaagcanggaaatttttttctaagattactctctttangtcatcccagctcgtgatggaccttggagc

SEQ ID NO: 14650 - DNA, 399 bp, Glycine max
  unsure at all n locations
agcttgcaaaggagggntgatgngttgtttgttgcaagaatactcttgatagacttcagctgaattctgcaaagacaactgatagcctggatgatttgaactccactaatcaagttaaagatatagacatggatgaaaatgctgattcttttgtggatgaatctgttatggaaaaggttctccacaagaggagtttgaggatgcgtaacatgcacagagcttggcagggtttgtttgatttcttgaatattccatttggatattgcatttggtatcacatgtgcttggaatggaatagtaatgatcaagagtgtgcgactgttgcgttatcttttggaatatggtaattttcttttccattccaattcatatccaaactatgagttagtctgtgtagtt

SEQ ID NO: 14651 - DNA, 323 bp, Glycine max
  unsure at all n locations
tagactgaatcctangtcctcgcaataacttattctaatatctactgactgancannagagctaatgaactcagtgacaatttctttggacaatagcttctcccgaatgaaatgacagtcaatttctatgtgcttggttctctcatgaaagactggatttgaagcaatatggagagtggcttggttatcacaatataacttcatctgcccaacttcacagaatctcaattcttcaagtagttgtttgatccacataagttcacatgtagccatggccataggtctatattcagcctctgcactggaccgggcaacaacagttt

SEQ ID NO: 14652 - DNA, 456 bp, Glycine max
  unsure at all n locations
agctgctggtgggacatcttgactggctnctatatctgttattcaccacagaatctgccttcntctatggtcagattgggaatgcctctaacagcacctttgtcaatgatattcttcatgcctcttaagagcagatgttcaaatctttgatgccatattttgacttcatcttctttggaggatggacatgtggaggagtaactggtttcttgaggtgtccataagaagacagtgtcctttgatctgttgccctacattataacttcattcttctcatttgtcaccaagcattctgactttgtgaagtttacattgaatccttcatcacacaactgactgatgctgatcaagtttgcagtcagtcccttcaccagcagtacttttgtcagactaagaagtccatcatggactatctttcgcattccagtgatctttcctttagagccatctccaaat

SEQ ID NO: 14653 - DNA, 415 bp, Glycine max
  unsure at all n locations
ctatgtcccangattggtcattcaaaagttacgttatgaccattcgaatttctcgagagcttctgttgttcaatttcgagcgtctcgatatattatctcccagattcagacatccgtgtgaaaagatatgaccattcgaatttcatgagtacttccgttgtgcaatttcgagcgtctagatatattatgtcccaaattcacacatccgtgtgaaaagttatgaccattcgaatttctcgagagcttctgttgtttaattttgagcatctagataagttattcccgtgaatccgacatgcgagtgaaaagatatgaccattccaattgctcgagtgctttcgttgtgcaatttcgagcatctagatgagttatgtacgcgaatcagacatcgttgtgaaatgatgaacatttgaat

SEQ ID NO: 14654 - DNA, 343 bp, Glycine max
cttctacattcaatttcgagcgtctcgatatgttacgggactcaatgagacatcccagtaaaaagttgttgtcgtttgaattggctcaaagcttcaacattcaatttcgagcgtctcgatctattacgaggctcaatcagacatccgagtaaaaagttattgtctgttgaattggctgagagcttcatcattcaatttcgagcgtctcgatatgttacgggactcaatcagacatccgagtaaaaagttattgtcgtttgaattgtctcatagcttcaacattcaatttcgagcctctcgatatattacgggactcaatcagacatcccagtaaaaagttatt

SEQ ID NO: 14655 - DNA, 359 bp, Glycine max
  unsure at all n locations
tctacactntatacaagaatgaagctctgttaccacttgttagacaagnggcctcagatatcttaagaagggggggtcgaattaagatattccaaactatatcccctaattaaaaatctatttcactttttaaccaagttatgaattcccttaatgacaatcttcttaaatattaattcaaatgaaacacattgaatatgaatataaagcgataataaataaaggagattaagggaagagaaaatgcaaactcggttntatactggttcggccacacccttgtgcctacgttcagtccccaagctacccgcttgagagttccactatcttgtaaattctttatacaagttctaaacaca

SEQ ID NO: 14656 - DNA, 384 bp, Glycine max
  unsure at all n locations
tttcgagcgtctcgatatattatgtccgttaatcggatatcctatgataagttatgaccatntgaatttctcgagtgcttccgttgttcaatttcgagcgtctcgatattttatgtcctcgaatcagacatcggagtgaaatgttatgagcatttcaatttgtcgagagcttccgttgttcaatttcgagcgtctcgatatattatgtctccgagtcggtcttcattgtgaaaagttatgaccatttgaatttctggacagcttttgttgttcaactttgagcgtctcgatatattatgtccgcgaatcagacatccgtgtgaatagttatgaccattcgaatttctcgagtgcttccattgttcaatttcgagcgtctcgata

SEQ ID NO: 14657 - DNA, 483 bp, Glycine max
  unsure at all n locations
ttgttgatgactaatatctgttggcacactcggttgtccttcttttggtattattnttccacccaactacattntctccatctattagactcgaacttaagaccttacttaaggaaactgaggtcactatcactcagactaacgactcattggcaatgtaattaacaaaatttattgtttattaaagtctaattntaattttttggtagtgtatatattcttacaccatcaatcaaatagaaagtattttaaatacgaattttaaagtaatataaaatacaattatcctaccatatgtggttatccataattggattagaatgtattttctttttacataatgttactcaacaataataactattggtaaacttaccctcttgaataactcttaacatgtntaaatttattaatntaaatattaactatatgtttaattaactatgaatattaangttatatannatttgatgctcacaatca

SEQ ID NO: 14658 - DNA, 425 bp, Glycine max
tcttagtctcacctgatgaattcgtggctacttcatgcactcctctaatgacaatagcatcacttctggcactaaattgctgggagtttgaagccatcttctcaattaaatttctggcttcagcaagggtcatgtctccaagggctccaccactagcagcatctatcatacttatttccatgttgctgagtccttcataaaaatattggagaagaagctgctttgaaatctggtggtgagggcaactggcacataatttcttaaatctatcccagtattcatataggctctctccactgagttgtttaatacttgaaatatcctttctgatggtcgtggtcctggaagcaggaaattttttttcctaagaatactctcttgaggtcatcccagctcgtgatggaccgtggagcaaggtaataaaa

SEQ ID NO: 14659 - DNA, 292 bp, Glycine max
gaatagcagcactatctccagcatcagcataatgtccatgaattacatatggccagacaggttggcccccaccaacttgttcactcaatacttttgacatattgagaatgtgagctaatgctccatccacaaattcttgaatataaggccaaagaagttctttccggaggtatttattgcgtggaccgaagggtattcttatgatatatgcaccactgctctccccaaggttatcatcatcatcatcacccggagttagcatttctgtaggctctccatagctccagtcaat

SEQ ID NO: 14660 - DNA, 484 bp, Glycine max
  unsure at all n locations
gcttttatccaggctcatcttggtggtgaagctccttcttctatggcttattccttaatggatggcgcctcctctcacctattttcctttgtcttccgctgcatctccatggtggaaaatcaccattaaaggaccccattgaagctctaagatccagcctccatagaagctccacaagcaagcttccatcaagccttgaaaacaaaaggtaaaagatactatggttgaaactagccaaataaacactaaaagaggtgtgaaagataaggtaaaaaaactaattggtaaaatgcaagctatctaggcggttttaccttatctactagaatggccaaaatacaaggcctagacgaaggagaaacctattctaatatttacaaagataagcgagctcatacttagcccatgggctcgaaatctaccctaaggctcatgagaaccctanggcctntccttggatctctagcccaatctacttggagtc

SEQ ID NO: 14661 - DNA, 439 bp, Glycine max
  unsure at all n locations
tgatgcctctntgtataactccttttacttttgggatctttccaatatcttctagcatcaagtcaagacaatgtgcagcacatggagtccaaaatatttttggtctcgtgacttctaaaattttacctaaaaagaccaaaatcaataaacttgtatgagtagtgtaacaattaaaagttataactataaaaaaaaacttcattaagcatgattgaattctcgcccaccaacacataattacttccattgtccgtcaccacttgaataacattcttttctccaatctcctcaacaaagctatccaaaagctcaaagatcttctgaccagtcttcatgtattcagaagcatccgcactcctcacaaactgtgttcccaatgaacaatttaccaaaaagttaatcaaagttctattcttcctatccgttcaaccatctgaca

SEQ ID NO: 14662 - DNA, 473 bp, Glycine max
  unsure at all n locations
gagataaacaagaaggctgaagcagagttgactgtgaatggtaatcatgggagctgatctggtgaggtcaaaagcctggagcagggaatagatgaataagctctcagcatctctgctctcattctgaccccttaaagatctgtttgaaaatgactgtagtttttgttaatgttatttatctgattgtttattaaaataacaatatacaattatagagcatagccctatcatgtaccatccttgggtgtattggacagacgtgtagcttctagttgctattgtaacattatgttgtaagacatgtgatatagacctgtaatcatatatataaggaagtgatcctatattatcataggtggtgttaagtaatttggtcctgccgaagaacggtgcatatgcaagtaccatctttttcatnggattggattatctcactntntgaaatcaagtgatagtgattaatcatgaaatac

SEQ ID NO: 14663 - DNA, 435 bp, Glycine max
tgtaataaagataccaattatcgatacaaattctccatatggttgatttatttaaaaaaaaaaaagtcaaaaacaacatgtatggaatagagatatttgaaccaccaaagtaaagaactgttacaaataaggaagaaatgaataggtttaaataggaagcaacataaaataaaccaaatttgagtggtttaaccctatatgctacactcgtttgctacctactattattggttacctgtgatgacagttaattcaaaatgtaatttataatattaatatcttatttttgatttttttaatttgtggttggttgaatactttggtgcatttgtcaagtgattacgattctttgtgttaaaaggtattatcgatcaacttctttatttctaactacaaagttttacatggactgtttatagaaaatatttgttatgt

SEQ ID NO: 14664 - DNA, 369 bp, Glycine max
  unsure at all n locations
attcatagtgacaccatagtcgtggagggaaactgcagtgttgtgattcaacgtatccttccaccaaaacataaggatccaggaagcgtcactataccttgttatgtatgtcaagtttcagtagtcaaggctcttattgactcgggagctagcattaatttgatgccgctttccatgtgtcgaaaacttggggagttggagataatgcctactaagatgacttntacagtagcagatcgctctatcaccagaccctatggagtgattgaggatgttctggttcaagtcaaacatcttatctttcctgcagactttgtgggtatggatatagaggaggatcctcgaattcccataattttgggacgttct

SEQ ID NO: 14665 - DNA, 302 bp, Glycine max
agtgaagtctgacgatattccgaagactatctttaggacccgttatggtcactacgagtatgtagtcatgccctttggtgcgactaatgcaccaggtgtgtatatggactacatgaataaagtctttcacccttactttgatagattcgtggtcgtattcatagatgatattttggtatattcaaagactagagaggaacatgaagagcacttgaggattatgctgcttacccttacgaatctacaactctatgctaagtagtccaagtgtgagctcttggttagagaaagttagtttccta

SEQ ID NO: 14666 - DNA, 451 bp, Glycine max
  unsure at all n locations
gcttctagacatcatcctatctaaaatggtttctcttttcttgcataagcttgacccaggggtcaccagacataacatcatctatgtgttttggctcaatctcttgagaaagctccttctctagactttgtccctaggatcaccaatgatctacgactntggatgatgtttcctcggcaaacgtctagttggttctctgacttcttcaagttgatcgtccactagtgagttggacgcaagcctatctttactggacatagtagcaaacttgacgatattttcaattttcatttctgcaaaggactcatccaactttgacatttgagtggcaggtttattgtcattatatcttacatgaatagactcttccacagtcaagggtttggagttattcactctatatgccttggacgaattagagtatccaagtaagaatccacaatcacatttt

SEQ ID NO: 14667 - DNA, 395 bp, Glycine max
  unsure at all n locations
agctntatctaatgggaatctggcanaatctgtctatgagaatgaatcgatggcccttgtgctttgtattcagcactggagacattatttattgggcagagaatttattgtgcacacagatcataaaagcttgaagcattctttacaacagagagtttcatctccagatcagcagtgttggttggccaaactgctangctatcaatttgaagttaagtacaagcctgacttagagaatagagccgatgatgctatgtccagatgtcatggttaggtagaaatgaattctattatttcttttcccttgtgggctgatagacagaaacttttggatgaaataactaatgacccgtacatttaaaagttactgagagaagtgtaggagtctcctaatg

SEQ ID NO: 14668 - DNA, 405 bp, Glycine max
  unsure at all n locations
gggataattcttcatttggttttgatgaaagccccatggatcaatgcatataccataaggtcagtaggagtaaaatatttttccttgttttatatgtagatgatattntacttgcaaccaatgatcatggtttgttacatgaggtgaaacaatttctctctaagaattntgacataaaggatacgggtgacgcatcttatgttactgacattaagattaatagagatagacctcgaggtattttaggtctatcacaggaaacttatattaacaaaattttagaaagatttcggatgaaagaatgtcagcaagtgtcgctcccattatgaanggtgatacatttaatttgaaccaattcccacagaatgactttgtgaggaaacatatggaaaacattcattatgc

SEQ ID NO: 14669 - DNA, 317 bp, Glycine max
  unsure at all n locations
gagaagggaaagtaaaattaatcaaatttggcatggcgagtaatgtagatccgggatgttgagacgtccaagcaccaaaaacctttgtgcatactgctatatccaagaaagatacatggaatactccgtggtgataatttatgaggagcataatctcgcaaacaaggataaacccgacaaccaaatgggtgaaagtgagcataatttggagaaacatcatgtaagagctcaaaaggagatataccttntaacaagggagtaggtaaccgatttataatataaacaacacaacaaaaagcatcgagccaatacgtagt

SEQ ID NO: 14670 - DNA, 330 bp, Glycine max
agcttgaatcggacatccgtgtgaaaagttatgactcatttaatttcacgagagcttgcgttgttcaatttcgagtgtcactatatgtgatgcgccataattggacattcgagttaaatgttatgaccatttgaattactcaagagcttccgttgttcaattctgagcgtctcgatatgtgaattgtctgaatcggacatccgtgtgaaaagttatgaccatttgtatttctcaagagcttccgatgttcaatttccagcctctcgacatattatgcgcccgaatcggacatccgtgtgaaaaatatgaccatttgatttctcaagagct

SEQ ID NO: 14671 - DNA, 410 bp, Glycine max
  unsure at all n locations
naagcttttatcattgnggtaagtgaaaaggatgattcctaataagcaagaacgttcagtcattccagcctcccaggtgaatggcacatagaagttggccatagtaaatgggtaacaggcaaaatgtgacattgatcactaaatgggtagtcacttaatgcatatgacaaaaagatacatacctgaatggctagaaatgcagccatgcaaatgcagttccctatcaagcacaaaactccaagatgaaaattgtcaaacccaaggttctgtaagccaccaattaaccatccagatggctctggctgacctctggcacttatttcattntgtgttacatgaccgagttcggcatatcctatcanagctggaccacgatacaaaaccatatatatggcaccagagacacagat

SEQ ID NO: 14672 - DNA, 255 bp, Glycine max
  unsure at all n locations
ctatcaccttgtacatacaaccaatcaatgagattggtctgtaatcatcaaatgactgagggtgtattactttgggaattagagccagaaaggaagcattactacctctanggaagctgccatgcacatggaactcatccacaaatcttctgaagtcaggtttcaccactccccagaattctttaataaaactgaaattaagaccatcacgcccaggacatttgtcncaccacagcttgcttgatctcatgatct

SEQ ID NO: 14673 - DNA, 381 bp, Glycine max
  unsure at all n locations
anngctttaactgaattgcaacgttccaattgttttttaaatggtgtaatcaattacaatatattggtaatcgattaccagtgtatctgaacattgaacttcaaattcaattgtgaagagtcacatcttttcataaaatgctttgtgtaatcgattacatnggtttggtaatcgattaccagtgacaaagtttgaataaaaatcatgagatgtaactcttccaatggttttcaagtttttctcgaggttataactcttccaatggttttcttgaccagacatgaagagtctataaaagcaagaccttgacttgcatttcaataactttttaacaattctttagaacaacttttgagaaacctttgctacttattcttcttc

SEQ ID NO: 14674 - DNA, 403 bp, Glycine max
  unsure at all n locations
agcttaggctaaattagtctaaactttcatatgctatttaagctaagtctagtccaacaagagggatcatgatgcaatcctccctaggaagggaccaatcactagaaccatgagcaagaggctccaagaagattgggctagagctgctgaagaaggccctanggttctcatgaaccttagggtagatttctgagcccatgggccaaggttgggtccaattatctttgtacatattagactaggatgtcattatatttggtccttgtatatagggctccatattgtaggtagggtacccttgaaatataggatttttcagcccttgtatttttgggcacctagactagtttttatattaggggtagttttgtaatttcacatgcactaagtggatattngatat

SEQ ID NO: 14675 - DNA, 401 bp, Glycine max
  unsure at all n locations
tcatatatgcaatttgaagatattntagcaaatttccagacagccaaattagcccaatattgagtactcaagatgcatatataggatgaagtttgttgggtggattacttagcttttgtgctgaataattaattaagttcatgttaaacaagtggcctcaataacttaaaaagggagggtgaattaagtttaaaaaatttctcctaacaacattttaattctctctttaaaatgattatgcagacttaatatgcagaanagaagtaacgaacaatttacttgatgcttctttaaatatgcaaagtaaaattaaactgcaataaattaaaagagnttatggaagagagagttgcacactcagttttatattggtttgaccacgttctatgcctacatccagt

SEQ ID NO: 14676 - DNA, 440 bp, Glycine max
  unsure at all n locations
agcttaagctccttcaactgcacaaggctcttaatatttgaagagtatccttgtggaaccttcacccgacgaatacactgacaaaaacttatcttctcctttntggacaaagtatggcaagctaggggcaagtaaattttcttcccatcagacattggatgcaactgtgatcgtatccccatataagctagatcttgacgggtattcaagccatccttcgtcttgccttgaatgttaaggagcgtcccaatcacactgtcacaaacatttttctacacatgcataacatcaatacaatgtctaacgtctagatcaaaccagtacagaagatcaaagaaaatggacctcttcttccatatgcaagtcttacttttatccttcttttgggtcttcccaaatatagnattcnagtgttgaacccgctgatatacctgctcacc

SEQ ID NO: 14677 - DNA, 418 bp, Glycine max
  unsure at all n locations
agcttcatgattgcctaagtgtggaccctttttgcaatcctccattctcccctntnttcggagccccatgaatgtcattgcctagcgctgttcatgtgtcctccaccttcgagtttggagctatatttcatgattgcctaagtgcggaccctcaagggcaatcctccattctcccccttttttggagccccatgaatgttatttcctagcggtgttcatgtgtcctccaccttcgagtttggagctatatttcatgattgcctaagtgcggaccctcaaggcaatactccattctcacactttttcggagccccatgaatgtcattgcctagcgctgttcatgtgtcctccaccttcgagtttggagctatgcttcatgattgcctaagtgcggaccctcaaggcaatcctccattct

SEQ ID NO: 14678 - DNA, 461 bp, Glycine max
  unsure at all n locations
agcttaatccagaaaggactactactattagttttgttcaagtctctcattataacattntagnaatagtgatatttacaatttaaataagcaaaaaaacatctgttgggaccatttaatgaacaaacttaagtaaattgaaaactttcacattgtttgataaaaataaaatttaatgatcaactcacaatttattgntaatataaattttaaaattattattataaaaattaataaatttattatacataaagaattataattagatgataatataaaattttgtataatgttaatatataattttttttctcataaaaataaatgaaacaaagtttgaatctagaaaaaatacatgttttaattatactttcaaagagtgtctttatgataataattgataattgattaagtcgcaatctttaaataatattataattagattatggtataagaataat

SEQ ID NO: 14679 - DNA, 335 bp, Glycine max
acaaaagagctatattgataaagtacttgatagattcagcatgaaagatagcaaaccaagggataccccaatagctaaaggagacaaattcagtcttaaacaatgccccaataatgaccttgaaagaactaagatgcataagattccctatgcgtcatcagtagaaagtctgatgtatgctcaagtttgtacttgtcccgacataccatttgtcgtaagagttatgggcagatacttgagtaatcctagattgcacattggaaggcaagatatgcgtaatgcgtacttgaagagaaaaaagctacatgctcactatcagaagtctgaaaattgga

SEQ ID NO: 14680 - DNA, 456 bp, Glycine max
  unsure at all n locations
agcttttaaactntatacaagaatgaagctctgataccacttgttagacaagtggcctcagatatcttaagaagggggggttgaattaagatattccaaactgtttcccctaattaaaaatctatttcactttttactcaagttatgaattcccttaatgacaatcttcttaaatattaattcaaatgaaacaatttgaatatgaatataaagcaataataaataaaggagattaagggaagagaaaatgcaaactcagttttatactggttcggccacacccttgtgcctatgtccagtccccaagcaacccgcttgagagttccactatcttgtaaattccttttacaagttctaaacacacaaggacaatccttcctttgtgtttagagatcctttacaacaagagactcacagtctcttaatcccttagagaatgagaagaagaagaagaac

SEQ ID NO: 14681 - DNA, 199 bp, Glycine max
tactgaatactgcacatctgaaggcatcattcatgagttctctgcagccattacaccacaacaaaatggcatagttgaaaggaaaaacaggatttttgcagaggctgctagggtcatgcttcatgccaaagaacttccctataatctctggggctgagccatgaacacagcatgctacatccacaacagagtcacactt

SEQ ID NO: 14682 - DNA, 438 bp, Glycine max
  unsure at all n locations
agctntgagccaattcaaacgacaataactgtttcctcggatgtcagttagggtcccgtaatatatcgagacgctcgaaattgaatgttaaacctatgagccaattcaaacgacgatgactctttactccgatgtccgattgagtcccgtgatatttcgagacgctcgaaattgaatgttgaagctctgagcccattctaacgacaataatcatttactaggatgtttgaatgagtcccgtaatatatcttgacgctcgaagatgaatgtttaagctctgagccaattcaaacgacattaactttttactcggatgtctgattaaggcccataatatattgagacgctcaaaatngaatgttgaagctctgagccaattcaaacgacattaactttttactcggatgattgattgagtaccggaatataacgagactc

SEQ ID NO: 14683 - DNA, 232 bp, Glycine max
aactttatggccttaaacaagcaccgagagcttgctacaacaaaatagaggcctattttattcaaaatggatttggtagatgcctttgtgaacatacattgtttacaaaatcacaagagggagggaaacatttaattgtaagtctctatgtcgatgacttactatatactggaaacgatggaagtatgtgtgatgagtttagaagatccatgatgacaaacattgatatgtc

SEQ ID NO: 14684 - DNA, 417 bp, Glycine max
  unsure at all n locations
agcntttgaaccttgaattgaaatgactgctcatataaaggcttgattaaacttccatcttccaacgagcacagtaacaccctaggaggacaaccaagggaatcatgaatatcaacaaaatttcgcatatgatgatcaaggaccacaatgtgcttccccttgctgtgcgtaagtctgacagggacctgaagtggttgacttccatcaacaaaaagtttggaacaatacaaattggactccagaggaccatctaaggtcccagtaaaatatattagacctgtagcctcattcacaccggcaatttgctcaaccatccattcaccttcagtgatgggtcctaaacaagtcccatttgcatcatgaagataaagatgtctaaatcctggtttctcactagcccagataaatccacccgaa

SEQ ID NO: 14685 - DNA, 443 bp, Glycine max
  unsure at all n locations
agcttaagcanaaacattatatggttntntgtctgttggattctactcagttggatagttttctgttgattgattgcgtttgaaatgggtctcttgcagattctctcatgttttttttttatgtttttttggatttcattatatgtgtcatgtacgttgcttaatgttctttatctatttatttatagattcattttttcttcttaaaatgtcaattttatagacattttgtaggagattctgtaattaagagctctttgaatgaaagtacatatcggtaattcactatgctgagttggatttttaagcatgcttagatacccttcatggagtcacctattaatggagttggttccttatcagaggtgtgtatctagcttaattgggttgtggagacgtaaggagtgtgtatctagctgaatagagtggcacaagaacttctt

SEQ ID NO: 14686 - DNA, 430 bp, Glycine max
  unsure at all n locations
agctnnggatttcttttagtatggaatctattcttcctaagatggagccaaacccagtcacccttattaagaactagctcttttcttcctctattgcctttagttgaatacaccttttgttggttctctatttggttcttaaccctctcatgcaacttctttacaaactctgacctagattccccttctttatgtataaaagaagtgtccagtgggaggggaatgaggtctaacggtgttaggggattgaacccatagacaacctcaaaaggggactacttggtggttctatgaacccccctgttgtaggcaaattctacatgaggaagatactcattccaagacttatggttgcctttcagaagaatccttaaaagggtggataaagacctattcactacctctgtttgcccatcagtttatggatgac

SEQ ID NO: 14687 - DNA, 325 bp, Glycine max
acatccgagtaaaaagttattggcgtatgaattggcttaaagcttaaacattcaaatgtgagcgtctcgttatattacaggactcaatcagacatccgagtaaaaagttattgttctttgaattggctcagaaggtcaacattcaattttgagcgtctcgatatattacgggactcaatcagacatccgagtaaaaagttattgtcgtttgaattggctcaaagcttcaacattcatattcgagcgtctcaatatattacgggactcaatcagaacatcgagtaaaaagttattgtcgttgaattggctcaaaagttcaacattc

SEQ ID NO: 14688 - DNA, 450 bp, Glycine max
  unsure at all n locations
tgaagctttgatgtattaatataacggggnattgtgttaattatttatatatgcataccaatatttacaatacatctgttttcttataaatttaattaatgtttttttatgcactgatatgcacataatatttatctagggatatatatatatatatatataaagnattacatgtgattgtacactgatatgttagatctatttgtttataagttttgaagttagatgtgttatgttattattattatattttttctctaattgttaagtatactttgtaattagttaaattgtgaaatgttaaattgtagacatgagatatggctgtgaatgagtgtgtgattaatacttgtagtgatattacttatcttgtgaggtatgagttatacaataacccgaccagctgttacctcgagaaatattttatgcacagttgtaaaggaaaaatgt

SEQ ID NO: 14689 - DNA, 416 bp, Glycine max
  unsure at all n locations
agcttgttccattataaatctgggtgggatattatcatctggctggtgcgagtttttcanaaatcgatgttctagtaaaactgcagctgttggccgctctgctggatttcttttaaagcagcacctcaagaaatctttaccctcaaatgaaagtgtttcaggtataggaggggtctccttcataaccttaaacagagctgcagcctgcataattagaaaagaagtttatttagcaagataaaaaaaaaggacccgtatacagatagcatctctgcctaatccacaagttgcaaacagaaaaaagttggctaaaagatgccttagctggttgttaaattgaggtttgccaaaataagtaaaaagttgacacattatcctacattaccaaacttcagaatctcatattctcatagaag

SEQ ID NO: 14690 - DNA, 368 bp, Glycine max
  unsure at all n locations
agcttgccttgccccttgatatatttgagggactcatgtgtcactatgaatgacaaattccttgggataaaggtagtgttgccatgttttcaaagcccgtactaaggcatacaactccttatcataagttgaatagttaagggtaggaccacttaacttttcactaaaataagcaattggatggccttcttgcatcaacacagccccaatcccaacatttgaagcatcacactcaatttcaaaagatttttgaaagtttggcaacgcaagtatggggacattagttagcttttgcttaagaacattgaaagcttcttcttgtttctctccccatttgaaaccaacattnttcttgagcacttcattga

SEQ ID NO: 14691 - DNA, 466 bp, Glycine max
tagagtgcacctgcatgcatgcaagctgacaccaagtaatttctttcttgttttatgtccaaagtatatttacgttggcataagaatatcccacttggattccttgcaacttctacaccaagaaaatacttcagggtccccaaatctttcatgtgaaagcacttgctgagatatactttaaatttttggattgtagtggagtcattcccacacacgatcaaatcatccacatacaccaaaactaccagttgcactccatgattaagaagagtaaagagcgagtggtcagaggatgattgttgaaacccaaaattcgtgaaggcaaatgatagtttggcaaaccaacatcgaggggcttgcttcaagccatacaatgatttgcgcaacttgcaaactaatcctggttgagatgtgcgaaagcctgggggcaacttcatgtaaacatcttcatgaagatcaccatgga

SEQ ID NO: 14692 - DNA, 446 bp, Glycine max
  unsure at all n locations
agctnggtcttaattatataaagatagatgtttgtccaaaacattgcatgttgtatttgggagatgatgaaaaaagtttggatgcttgtaagcattgtggtacatctagatggaaacccaacaagaagaagaaaatagctgcaaaggttttacgttactttccatcgaaaccaagattgcaaagattgttcacatgtcgtaagactgcaaaagatatgagatggcatgttttggaagacaataaagatgggttgttaaggcatccaagagatggagaggcatggaagacatttgatttaatccatcctgagttttcttcagatcctcgaaatgttcgcttaggccttgctactgatggttttaatcctgctaggaccttgagttctacctatagcatctggccagttttcttaattccatataatcttccaccttggatatgtatg

SEQ ID NO: 14693 - DNA, 442 bp, Glycine max
  unsure at all n locations
agcttattatgctagtttattcacaactcattatattctatatttatgtaattatagcagaaactaagacttgagtgcgacaaaaaaaggacaaaaaaggataaaggtttactggttttttttttaaaaatactattataattataattctgagtggtgttttattattttatatataaaaaagncgaattgtcattggttatactactatttagtaaggttttacaagaaaaggaagggggagggggaattttcattttaataaacatttgatatatgattatataaaaaaatacaaatgttattttaatacaaatttaatgctctatattttgttttatatatatcatataatcctatgactctataaacaaatatataaaatatgcttcattcctttcccttataagaacataacttctaaatatatcttttttattta

SEQ ID NO: 14694 - DNA, 439 bp, Glycine max
  unsure at all n locations
agctngcaatgacgcatctacttcttcattttattatatacaaagatgagtgtctcttaatcttaaatattctgaatttgtttattagttagaaatacttcaatttgaacaaaatgaacattgtctcttgaattatatgaagggtctcgctcggaatctttctgagttcttgattttatgcggcataaataaaaactaatatgatgtgctttacgggcaagggaaaaaaaggaaaagtttttaaatataaattactttattttctaaaatttaaatatagtgattatataatctttttatattgttatctaatcatagatttattaaaatatgtccaatttctcttctctatattattattttgtgatactttcattctaatatattcttttcgtgtctcaattttcatctccctcttctattctttctttctttatct

SEQ ID NO: 14695 - DNA, 263 bp, Glycine max
  unsure at all n locations
atctccaccggacaagcgctgatagagcgtaacaaacagcaccaagtaatgcaccatccccagcgaanacaagcatactgcactctctttccaacccatgttcgccgcagcttgtgccccgaccaagttccctatcaccgacatctggctggtcggattcgccacccgtcgacaaaacctcttncccttcgtgaaccactgcccgtagatcttcacgtccagcaccaccaccggcaccgcgaacacccaccacagaaccaagt

SEQ ID NO: 14696 - DNA, 271 bp, Glycine max
  unsure at all n locations
taacttctctagtgttgaaagaaacctctgtctcacactatcacaacaaaataatttacatttaagcacaagaagagaatttggaatggcacatagtatctntggccagactcgtagtaccttgggtgtaatctatagaaataaaacaacataagtcaggggatacacaacttaacctttacaatgttattgataatcacaataaaattacatgatatatttaagagtattactaccttagcaaaagtgtttaaactaccaatgtaaagcc

SEQ ID NO: 14697 - DNA, 256 bp, Glycine max
  unsure at all n locations
gtcatatatactgactcctcaagaatcccatttagaaaggcattgttcatatccagctgatacaactcccaccaatgtgagagaagcagggtgagattagtgcaaattgtcacaagcttgaccacggnggataatgtctcatgaaaatcgaaaccatggacttgatggaaacccttagctaacaaccttgctttgaactttgtgataaagccatcaacattttcctagactctgaaaacacacttacatctaatag

SEQ ID NO: 14698 - DNA, 342 bp, Glycine max
  unsure at all n locations
taccctaatgtctaaattntatgggattaagatggtcattgaccaatccctattntatgatttaacacaattgcctagtgaatgtgtgccttttgagggtgcactgatngatgattgaaaattcaatatttctgtgcatgatgcccgccggttggtttgcaccaaccaagcggatatgaccggaaggattcttgccatatcattggctttngaaagccgcatcctacattaccttattgttcacatattgcttcctagatcttcagatcttgctcaggtttctgaagaagatctcattgtcatgtgggcctctcataaacgttacaaattgattgggcacac

SEQ ID NO: 14699 - DNA, 349 bp, Glycine max
  unsure at all n locations
gcatgcaagcttttgcaagctgagatcatttattctatctcctatatccaatgggtgagtcgcgtgcaggtagtcccgaanaagactggcctcacagtgatcagaaatgagaaggaggagctgattcctactcgggtgcagaacagttggagagtctgcattgactataggaggctgaaccaggttaccaaaaaggaccattttcccctgccattcattgaccagatgcttgaacgcctggcaggtaaatcccactactgtttccttgatggtttttctggatatatgcaaattactattgctcctgaggatcaggaaaagaccacattcacctgccccttcgacactt

SEQ ID NO: 14700 - DNA, 305 bp, Glycine max
cctctaatgtgtcatctctcaatagattatccgatgattcgctgcggatatgagcattccaagatgttatatggcgttgatatgcaccattactgtggttcttctcttgacgcggtaagaaccgggcaatttcacctgctaaactcttcatagaatccacaacatcctggatgggtaattcaccgagcctttccaaccagatttcacaggtggcatatattggaggaccatacattcttaggagtggacgttggggtctcttattttgcctggcttttgttaagagaacacatttggcagccatc

SEQ ID NO: 14701 - DNA, 386 bp, Glycine max
  unsure at all n locations
caaacttgatgcattggttaacttggtaacccagctggtcttgaatcanaaatctgtacctgtcgcaagggtttgtggtttgtgctcctctgctgaccaccatacagacctttgcccttccatgcagcaacctggagcaattgaacagcctgaagcttatgctgtaaatatttacaatagacctcctcaacctcagcagcaaaattaaccacagcagaacaattatgaccttctcagcaacagatacaaccctggatggaggaatcaccctaatcttagatggtccagcccttagcaacaacaacagcagcctgctccttccttacaaaatgctgctggcccaagcagaccatacattcctccaccaatccaacaacaacaacaac

SEQ ID NO: 14702 - DNA, 272 bp, Glycine max
  unsure at all n locations
ctcgggaaatctcttcagctccacctatgtngcttataagcaccaattcgaaatagtctcttccattgatggtaaatctgatgcctccacttcttatgcacccaactctgcataatataaatgttactagttagcccaattttttttaaaccacatgtattctttactagaaacaaaataaaaggttaagacatatggcaattgacataacataaagatacttacttcctgtacaaaattggtacaatgccagctttgtacttggctattgt

SEQ ID NO: 14703 - DNA, 275 bp, Glycine max
  unsure at all n locations
gtacaagtccttataaaaattggtgacaagactntcaacggctcgagtatcgaagatccaattaccattctcatctttcaacatatcatgtttattccgcttccgtctgatcgctgtgataccatganaatacttggtattgtggtcccccatatacaaccatttacctgtggacttttgagaccaatgaagttcttcttcagccaagacttgttcatattctatccaagtcttcttatattctgaagctgcctacaaatcagacatgccactac

SEQ ID NO: 14704 - DNA, 335 bp, Glycine max
  unsure at all n locations
ccattgctgttctgaatgatctaagtccatggtattcttggaacaaagcgntctctctgaaaccaggagctccttttccccatgttcccgcctctgagtgttccttcaagtactttttcagcatatcagatgaaacctgaagaatacaattaatataagaagattaataagatgtacactataaacaattcttctactcttctactatatataagttagtatgttaattacttacttgattttctgccaatcccatttgtataactncggaggagtttgttaattcatcataagggttctcgtcatangctctccacccagcaaaatagggggag

SEQ ID NO: 14705 - DNA, 342 bp, Glycine max
  unsure at all n locations
gtccnctaatctctctctcatgtcggcgtccatcanaatggtgctcgaattgatgtccctgtgaataacaacctggtcccaaccgtggtgaaggtagttaagcccctctgccacgtcgacaaggatacgacggcgtngctcccaccccagaagcttctccgacttatcgaanacccacttgttgagactcccgttgggcatgtaatcataaaccaacataagctcgtcccctttctgcaccaccctctcatttgaaccaagttcttgtgctgaagcctccccatgcttgaaatctccgccatgaattcccgcaacccttgcttcgaatcgtggttcacgcac

SEQ ID NO: 14706 - DNA, 418 bp, Glycine max
tttgagcgcgtcgtaatattacgggactcaatcttacatccgagtaaaacgttattgttgtttgaatggttcagagcttcaacattcaatttcgagcgtctcgatatatgacaggactcaatcagacatccgagtaaaaagttattgtcgtttgaattggctcagagcttcaacattcaatttcgagcgtctcgatatatgacaggactcaatcacacatccgagaaaacaatattggcgtttgaatttgctcagaggttcaacattcaattttgagcgtctcgttatattaacggactcaatgagacatccgagtaaaaagatattgtcgcctgaattggctcagagcttcaacattcatattcgagcgtctcgatatatgacgggactcaatcagacatccgagtaaaaagttatt

SEQ ID NO: 14707 - DNA, 376 bp, Glycine max
  unsure at all n locations
atatatcgagacgctcngaaatgaatgttgaagctctgaaccaactcacacgacaataactttttactcggatgtctgattgaggcccgtaatatatcgagacgnctcgaaatgaatgttgaagctctgagccaattcaaacgacaataactttntactcggatgtctgattgaggcccgtaatatatcgagacgctcgaaattgaatgtggaagctctgagccaattcaaacgacaataactttttactcggatgtctgaatgacgcccgtaatatatcgagacgctcgaaatngaatgtngaagctctgagccaattcaaacgacaataactctctactcggatgtctgattgaggcccgtaatatatcgagac

SEQ ID NO: 14708 - DNA, 476 bp, Glycine max
  unsure at all n locations
agctnnggcaaatntcgaagggggtaatttgtgaaatttatagagccaacaagaaaaagcatcagctgcgaggacatgatctaaactctcccctaattggtggctntaacataaatgaaaatgagacgtgttcattaaacaattttgttgattagaaaattctaacttgtaactgacattcatggttgagtgagaccaacctatctcaaatattaatatattatttaaactagttttgtatcgtgtaacgtacagtttttttaaaatattatataagaattatttatgatatnagattgatagataaaaaataatataatgttatattggtaaaatatgaccaacatatntaaaaaaaacatagcaagtttaatttttcanaanagtatctaatagatgaacaatcactaaaaaattgaagaccattgtctcacttcgatataaaataattatataagaattaatatatttatatt

SEQ ID NO: 14709 - DNA, 300 bp, Glycine max
  unsure at all n locations
gggccatgcaagttgaaagccttggaggaaagaggtatgcctatgttgttgcggatgatntctccagaattacctgcgtaaactttatcagagagaaatcagacacctttgaagtattcaaagagttgagtctaagacttcaaagagagaaagactgtgtcatcaagagaatcatgagtgacccatggcagagaatttgaaaacagcaggttcactgaattctgcacatctgaaggcatcactcatgagttctctgcagccattacaccacaacagaatgggatagttgagaggaaaaac

SEQ ID NO: 14710 - DNA, 407 bp, Glycine max
  unsure at all n locations
gaccttaagaggggtgcaagtggcaggttcttgaacactgctgcttatggccactttggaagagatgacccagacttcacatgggaggtggtcaagcctctaaagtgggaataatgccatgaataaagctgattgccaagaaactatgtgtgatcttatatgctntcatacctaagatccgngatatgatttgccttagcttttgtatctttataaataaataaaacatatatatgtcgagttgagtatatgaacatacaaaggaagctgcatagcagcatcaatgtactattggaagttaatgtttgagatatatccgctaccatcgctatccattatccattatgtgtcctctcaatngctgagagacttagagaatcttgagtctcctcattaactaattggac

SEQ ID NO: 14711 - DNA, 364 bp, Glycine max
  unsure at all n locations
agctgtggttctctgagtatataggatggaccacttccaacaaaacaattgatgcaatcctacctcccaagatcatcggatagaagactccaagaagattgtgccaaagatgcaagagaaggccctagggttctcatgagccttagggtagaattctaagcacatgggccaaggttgggtccaatttatcttgtacatattagactaggatgtcattatatttggtccttgtatatagggctccatattgtaggtagggtatcctagaaatataggatatctcagcccctgtattttacggcacctagactaggtttcgtattatgggtagtnttgtaattcacatgcactaagcggatatttg

SEQ ID NO: 14712 - DNA, 416 bp, Glycine max
  unsure at all n locations
atcatctgcaggcatgctgccgcatgcaagctntgatgcaacatatggagaggttaatgaaacttctagatgatgcgctccatgagaggttggatcaaatggagaatagagatcataatgaagaagaaaggaggagaagagggaatgatggtgttcctagacaaaaccgaattgatggtattaaactcaacattcctccctttaaaagaaagaatgatccggaggcctacttgcagtgggagatgaaaatagagcatggtttctcatgcaacaactatgaggaggaccaaaaggtgaagctggctgccacggagttttccgactatgctcttgtgtggtggaacaagctacaaaaggagagagcaagaaatgaagagccaatggttgatacatggacggagatgaaaaagatcatg

SEQ ID NO: 14713 - DNA, 394 bp, Glycine max
  unsure at all n locations
agctntctattcanacctatatatccaattatgctctttaatttatgaagnttatgggattaagatggtcattgaccaatccctattctatgatttaacccaattgccaagtgaagatgtaccatttgaaggtacattgattgatgattggaagtttgatttttctgtgcatgatgcccgccggttggtttgcaccaaccaagcggatatgaccggaatgcttcttgcccgctcattggctttngaaagctgcatacttcattatgtaattgttcgcatcttgctttcaagatcttcaaaccttgcacaggtttctgaagaagatcttattgttatgtgggcttatcataaacgcctacaaattgagtggcacatcttgtagatatcgatgcat

SEQ ID NO: 14714 - DNA, 370 bp, Glycine max
  unsure at all n locations
tatctcttctaacataatctttctttctcgacccatactgaccagtcatctcacaaccaattatcacaaatgaagtccttcttctcataccagtgtttgtgtctgacctcataatcaccgccactgcaaaacatcatctcaggtagcaaacatcttgatgcaatcctccctaggaagggaccagtcactagagctatgagcacganggcttcaagaagatngtgctagagtagctgaagaaggccctanggttctcatgaacattanggtagatttctaagcccatgggccaagggtgggtccaattatctntgtacatattagactangatgtcattatatntggtccttgtatttagggctccataat

SEQ ID NO: 14715 - DNA, 455 bp, Glycine max
  unsure at all n locations
atcctatctccgacagccaatgggtgagtcccgtctcatgtagtcccgaaaagactggcctcacagtgatcagaaatgagaaggaggagctgattcctactcgggtgcagaacagttggagagtctgcattgactataggaggctgaaccaggttaccaaaaaggaccattttcccctgccattcattgaccagatgcttgaacgcctggcaggtaaatcccactactgtttcttgatggttctctggtatatgcaaatactatgctctgggacaggaaagaccacattcacctgcccttggactttgctatanaggatgctttcggctgtcaatgccctggaccttcaacgggctgatagattttagtgcttttagaaatgcataagtgtatggtgatcatgattggtctcttgaggtgttgaagttgaaagttgataatgctgaactactgtt

SEQ ID NO: 14716 - DNA, 448 bp, Glycine max
  unsure at all n locations
agcttatgctgcatatatttacaatagacctcctcatcctcatcagcaaaatcaaccacagcagaacaattatgacctttccagcaacagatacaaccctggatggaggaatcaccctaacctcagatggtccagccctcagcaacaacaatagcagcctgctccttccttccaaaatgctggtggcccaagcagaccatacattcctncaccaatccaacaacagcaacaaccccagaaacagccaacagttgaggcccctccacaaccttccctcgaagaactngtgaggcanatgactatgcagaacatgcagtttcagcaagagaccagagcctncattcagagcttaaccaatcagatgggacaattagctacccaatggaatcaacaacagtcccagaattctgacaagctgccttctcatgctggtcaaaatcccaaaaat

SEQ ID NO: 14717 - DNA, 320 bp, Glycine max
  unsure at all n locations
cccaaacccaatcacctggntcaagcacgactttctttctacttttgtttgcttgccttgcataactcgcatttttcttttcaatttgagccttcacttgctcatgcagcttcttcacatactcagctntagcctgtgcgtccttatgcttaaacatagtaatgttaggcataggcaacaaatcaagaggagtcanaggattaaatccatacactatctcaaatggtgaacaattagttgtgctatggacagtccgattataagcaaactcaacatgaggcaaacatgcttcccaagatttaagatttttctttaaaaca

SEQ ID NO: 14718 - DNA, 472 bp, Glycine max
  unsure at all n locations
agctntacagcaaatgccactctactccaaattcttgaaggatatgttaacaaggaaacataagtacattcaccaggaaaacattgttgtggaaggaaattgtagcactgtgattcaaaagatccttccagctaagcataaagaccctgngagtgcaactattccttgtttaattggagaagtcattgtgggaaaggctcttattgacttaggagccagtataaatttaatgccactctccatgtgtagaaggttaggagagttggagataatgcccactaaaatgactntacaactggctgactgctctattaccagaccatatggagtaattaaagatgtgctggtcagagtgaaacatnttatcttcccgggagacttaatggtaatggatatctgtgaagatactgacattcctataatattgggaaggccattcatgttaactgctagnttgcatagtgacatgggt

SEQ ID NO: 14719 - DNA, 400 bp, Glycine max
  unsure at all n locations
agctngaaggcanactggatgcattggttaacctgttaacccagctggccttgaatcagaaatctgtacttgtcacaagggtttgtggtttgtgctcctctgctgaccaccatacagacctttgcccttccatgcagcaacctggagcaattgagcagccgaaagcttatgctgcttatatttacaataaaaactcctcacctcagccagcaaatcaaccacagcagaacaattatgacctcttcagcaacagatataaccctgtatggaggaatcaccctaacctcagatggtccagccctcagcaacaacaacagcagcctgctccttccttcgaaaatgctggtggcccaagcagaccatacattcctncaccaatccaacaacagcaacaacccca

SEQ ID NO: 14720 - DNA, 290 bp, Glycine max
cattggattgacaaacatgaatgagagagttctcggagcgacgcatagaggaactgacatagagctcacgataggtgaagggagtttattataatttacgggctttgataccatagttagtgatgtagctccatgtggagcttgtaggccttgaatcttcttcatcaatagagtcctttgcttcttgaaggtcaatggcagcggaatggagacggaaaaagaccattggagatgccacttcaagaaaatatgagtaacaacaagctcccaccataagaagctatgataca

SEQ ID NO: 14721 - DNA, 463 bp, Glycine max
  unsure at all n locations
gcacattgttctcagttataccacatgcttatactatatgtatttctctatatatnntccaactggaccaatgagnttccattnttntctttatcttcatattaataatttgcaggtggagaagattgaggacagtattaaattcataaattctagacctaaacctcttgccctttatgttttcaccanaaaccaaacactgcagagaagaatgatatctganacatcatctggcagtgtgactatcaacgacgcaattctacaagtaataccaataccctatcaagcattaatattccactcttaatctaatctttttgcatattttatttattaattcctcagacttagtgcataatatttgtgttaaatntgtgcagtatgcagttgatactgttccatttggaggaagtggggaaagtgggtttggcatgtaccatgggaaattctcctttgacacatt

SEQ ID NO: 14722 - DNA, 460 bp, Glycine max
  unsure at all n locations
ttctctgatctatgacttcttatgggggngagcttgttcttgactcatcttctccttgaagtggcatctccaatcacctttcctcattctgcattctgttggcattgattttcaagaagcaaatgactttattgatgaacaagatctaaggcctacaagctctacgtggagctacatcatgtggtatcagagcattttcatctaggtgatgttctgttgcttcctttatcttttgtttagtcaattcaatttaattccatgttcttcattgtcttctccatgtatctcctccattgtcttgtggtttggtgctatttanagtagattcaaaaaaataaacctattaaatcttaaatctgcacttgntcttgcatttctatgggtcaaaatttatagatctactcttgaatcatgtttttgtggttgatttaggttctatcatctttcagtcataatcttc

SEQ ID NO: 14723 - DNA, 311 bp, Glycine max
  unsure at all n locations
ctaccttttgcctttntatgtttgataacataagggaattgctctagaaattccacccacttcacatgccttttgttaagcttgccttgccccttgatatatttgagggactcatggtcgctatgaatgacaaattccttgggataaaggtagtggtgccatgttttcaaagcccgtactaaggcatacaactccttatcataagttgaatagttaagggtaggaccacttaacttttcactaaaataagcaattggatggtcttcttgcaacaacacagccccaatcccgacatttgaagcatcacactt

SEQ ID NO: 14724 - DNA, 347 bp, Glycine max
aatctgcacctgttgcaatagtctgtggtctatgttcttttgcagatcaccatacagaatcttgttcatctgtgcagcaatctggagtccatgagcaacctgaagcttatgctgcaaacatttataatagaccccctcagcagcataaccaacaacagcagaataattatgatctttcaagcaacacatacaatccagcttggagaaatcatccaaatctgagatggacaagtcctccacaacaacaacagcatgttccttcttttcagaatgctattggtccaagcaagctgtatgttcctcctccaatacaacaacaacagtcacaacaaagacaacaagcaact

SEQ ID NO: 14725 - DNA, 391 bp, Glycine max
cttgtgagaactcacatcggatcaaacgactaatcatatcagtctgtttatgaggaacctgatgaagacgggttgttggtgtttccctctcgcgatcactcctaactgtagctgcttcagctttgaggaccaatataacagacttatgccctcttgtcttgccgtattcggagcagctgcgctatggatgatcagtgatttgcaggaatatcttggcaagggtgaacaaggaaatgtatgtgccgaatttcaggaaggcttttgagcatttctgcatagatgccggtggtaagtcagttgtcgacgccatagaggaaagtctcaggctgcagaagaaagacggcctccaggatggcactatacagatttggcaatacttcatcttcttctg

SEQ ID NO: 14726 - DNA, 396 bp, Glycine max
  unsure at all n locations
ntgagcaaattcaaacgacaataactnttgactcggatgtcccattgtgtcccgtaggatatcgagaggctcgtaattganaacggaagctcggataaaaatcaaacgacaataagtcttaactcagatgtcctattgatccctgtaatatatcgagacactcgaaattgaaaacggaaggtctaagaaaagtcaaacgacaataacttttaactcggatgtctgattgagtcccgtaatatatcgagacgctcgtaattgaaaactgaagctctgagcaaattcaaacgacaataacttttgaatcggatgttcgattgtgtctcatagaatatcgagacactcgtaattgaaaacggaagttctgagataaatcanacgacaataagttttaac

SEQ ID NO: 14727 - DNA, 375 bp, Glycine max
  unsure at all n locations
cattcctctcttcccttanacttcttttatttattgctatntatctttcgctctatagaagtttattttgaatagtcttttgagtaattcatgttaagggtgcattgctaatccgaaaagagagagtgaaagtttaattggggaatagtctttgcatcttaattcaaccccccccttcttaagataactgaggccatatgtccaacatcctattcttgacaactcgcttctcgaagaagacaaactttccggaatgataaaatgaggccacatgaacgtctatatttttacttgaaaacacagtcaatcaaatgccctttttctttttgaacccctttgttttattatggaacttaatttgtttgaactttaccc

SEQ ID NO: 14728 - DNA, 434 bp, Glycine max
  unsure at all n locations
cttatgacacagtctcatggtctnttctggactacatgctgcatagatngggcttttgtcataaatggagaaagtggatttcagcttgtcttcactcagcaacaatttcgatccttattaatggcagccctacaaagggagttaccccttctagaggcttgagacaaggggaccccctagctcccttactctntaacatagttggggaaggcatcacaggccttatgagggaagcagtccggaagaatctctatagcagctacaaggttggtatgaaaaatgagcccacaaacattctgcagtatgcagatgatactgttttngtgggtgaggcttcatgggacaatgtcttggtgttgaaggctatgctaagaggctatgagctggtctcgggcttgaagaataactatgctaagaagtcaattggtggtata

SEQ ID NO: 14729 - DNA, 439 bp, Glycine max
  unsure at all n locations
cttgactgcgtgcatgcacgcttcctttacattctaaggactcttcatttccaagatggcttggcatttatccagttggtgtgtatcccttgatgagtcagcatgaaccataaaacttttctctttctaccccgaagacacacttttcagggttcaacctcatgttatactttctgagctggcagaagaccttntgtaaatctgtgatgtgggttgctaaatcattagtctttgacctccatgtcatccacatagacttctaagtttcattcaagctaacactngaacactntgtccatcatatgctggtaagtagctccggcatttttaagttcgaatggcataaatntgtagtagtagtttgtggattcgataataaatgttgtcttcttctcattgatagcgtccatctttatctaattgtagctggaatatgcat

SEQ ID NO: 14730 - DNA, 441 bp, Glycine max
  unsure at all n locations
atgctttaaatgaacattcaggggaaacgtttggtcaaccgaaactggngaataaatcactcatggtgtataaaaactcacacaggtaagtggtttacccttaatctaaaccatagctgcaccatgactttattntgcacatgatttcctatcgaaccaaaagattacacgcgcgatcacggatcaataggattttctcaagggtgatgtttttggagaggaagctgggtgttttggtcttttcctctttgtttacgtggggcgggacattgccagtcgagagcgaccttgaatggcaatcccaaaggaagaaccacttcaaaatgggttttccctttgccggcggtcatttaccacgccgaanatttatctggtccgaagatcttctgttctctttcctgggttcctttattgatcgagaattattctgttttcctccga

SEQ ID NO: 14731 - DNA, 424 bp, Glycine max
  unsure at all n locations
tcctttagtagggaatctatccttcctaatatttatccaaacccagtcaatcttattaagaactagctcttttcttcctctattgcctttagttgaatacacctttgtttggttctctatttggttcttaaccctctcatgcaacttctttacaaattctgacctagattccacttctttatgtataaaagaagtgtccagtgggaggtgaatgaggtctaacagtgttaggggattgaacccatagacaacctcaaaaggggactgcttggtggttctatgaacccccctggtgtaggcaaattctacatgaggaagatactcatcccaagacttatggttgcctttcagaagagcccttanaagggtggataaagacctattcactacctctgttngcccatcnagttgtggatgacaagtg

SEQ ID NO: 14732 - DNA, 334 bp, Glycine max
  unsure at all n locations
tgaattagaaatctgcacctgtcgcaagactctgtggtttatgctcctctggcgaccactatacagacctttgcccttatgtgtagcaatctggagcaattgaacagtctgaagcatatgctgcgaacatctacaatagacctnctcaagctcagcagccaaatcagccacaacagaacaattatgacctcttcagcaacaggtacaatctcgggtggaggaatcatcccaaccttagatggtcgagtgctccacaacaacagtagctacaacaacaacagccttatttttagaatgctattggcccaagcagaccatacgttcctgcactaat

SEQ ID NO: 14733 - DNA, 422 bp, Glycine max
  unsure at all n locations
tccgttntcaattgcaacgtctcgatatattacaggtctcttctngtcatctgtgcataaagttattgtcaattcaattttctccgaacttcggatctaaatgttgagcgtctcgatatattacgggactcaatcagacatccgagtgaaatgttattgtcgtttgaatttgatacgagcttccgttctaatattggagcatctctcgataaattacgacattctgtcaggcatccgagtaaaaagttattgtcgtttgaatcttctaagagtttccgctttcaatttggagcgtctcgatatattacgggactcaaccggacatccgtgtataaagatattgtcatttcaatttgctcagagcttctagtctcaattgtgagcgtctcgatatatcacccgattcaatcggacatccgagt

SEQ ID NO: 14734 - DNA, 453 bp, Glycine max
  unsure at all n locations
atgatgatataattaaactntatcaataatatatatataacaatgataacaacatttgattattcaagttaattaattgtatctataacctcttctaaacaacctaaaaatttatttattttattaattaaagttaaaaatatcaatttaagttatttaattaaaggaccacagctaggcgtgattttaaaaagaaaaaaaatgtatagatgttttaggtcatgtatttatatattagcatttgtgtaatcatttttaagtacaaaaataatttttacaaaaataaatatttttgtagttaaattgtcaattcataattaaggacaatataattgaaaaattatatacctaaaatcaatttaaaaaatgtatgaattattccgacaagaaaatattcaaaatattttcacttctaaaggtgagtacatatacactatattctaaatatttcac

SEQ ID NO: 14735 - DNA, 479 bp, Glycine max
  unsure at all n locations
gagatcatccnctcgacaacattattggtgatatctttattgngtaacaactagacattctcttagagatttatgcaacaatatggctcctgtatctatgattgaacctaanaatataaaagaagccatagtagatgataactggatcattgccatgcaagaagaactaaaccaatttgaaagaaacaatgtgtnggaaatagtagaaaaacctgaaaattatcctgttatagggacaaaatgggtttttagaaataaattagatgaacatggtataattattagaaataaagccaggttagcagcaaaagggtataatcaagaagaaggaatagactatgaagaaacatatgctcctgttgcaagattagaagccattagaatggctttggcatatgcatccataatggattntaaactntatcaaatggatgttacgagtgcctttctaaatggcttaattcaagaagaggtatatg

SEQ ID NO: 14736 - DNA, 492 bp, Glycine max
  unsure at all n locations
atgagtgcatgtccaatggaaattgagttatatctttttctttctttncatttgctagatctttcgtgtggtagaaaatcaattgactagaatacaagaatcaaaataacagctagtgtagctagaggcttagagtatttgcatagtaaaatgaaacctcttatcatatatgaagacctgaaatgctccaatatcctgttaggtgaaggatatcattccaagttatctgattttggcttggcaaaagtaggatcaagtggtttgtgaaatagaaaggataacatactaacatgggagcaatttaggataacacatgttgttctaccaattctgcggagaaaataatggaatttttttttgctcatctaaagtaagttgtatatatataaatgagtaccagaggtactgtagatacataatgggagtggatagcagctggtctgaagccaagatcatataataaaaccaagtgacccgaagaacatatcatta

SEQ ID NO: 14737 - DNA, 453 bp, Glycine max
  unsure at all n locations
ctcagcttttaatagtccgcttgcttgccttcntattcttttaacataaacattangcataggcaaaagatcaagaggagttagtgggttaaaaccataaacaacttcaaaaggagaacaattagtggtgctatgaacaactctattgtaagcaaattcaacatggggtaaacaagcttcccaagtttttaagttcttcctcaaaactttcctaagcaaagttcccaaagtcctattaacaacttccgtttgcccatcggtttgtgggtgacaagtggttgaaaataacaatttagtgcctaacttgctcctcanagtcctccaaaaatggcttaggaacttagagtccctatcactaacaatgctccttggcnaccatggagtctcacaatctcttgaaaacaaatcgtcacatgggaacatcataactttttcatggataaatgaccattt

SEQ ID NO: 14738 - DNA, 440 bp, Glycine max
  unsure at all n locations
agcttcccttgataaggaagactcttatatatgcaattaatctagttgggtttatctatgcccattctagtaccttaagtttgttgagaaattttacaaacaagagggaattggtgagacatgctattactagatttgccacttcttatctaaccttggaaaggcttcacaaagagaaagccaatattagaaagatgtttacttctgatgaatggaccttgaacaagctatctaaggagcctaagggaaaagaagctgcaaaggtagtgctcatngccttcttttggaatagtgtggtttacactcttaaagtcatggctccacttgtgaaagtgcttcgtcttgtggatggtgaaaggaaaccagccatgggctatatttatgaagcaatggacaaggcaaaagaaacaattatgaagtctttcaacaacaatgaaagc

SEQ ID NO: 14739 - DNA, 216 bp, Glycine max
cttacctaagcatctgttctagctgttcctgacacttctaagactcctgagccacgatgtcaagccgctggagcgggagctggagctgtattgttacaaggaggtcaccttattgcttattctagagagaaacttcttagtgccaccctcaactaccccacctatgatgaagagctttatgccttaataagagccctcctaacttgggaacattac

SEQ ID NO: 14740 - DNA, 346 bp, Glycine max
  unsure at all n locations
taagctcctagctatcctcatagtatgcctttatgagagtagtatatgaagttctagtaggtttacatccgtttgccaccatatcaaccagataatctatggcaagactggtttgctgagctttacatagtcccatcattattgagttataaatgaatgcattgggtttaataccaaaccctttaagaatggaaaatttgattgttatgaactttcttcacactangcccccactactgaagtgcaagttattagatcaggcttaagacccttataacacatctcttccaagagctctacagccagttcggcttttcccacctctaagagcccattaattattata

SEQ ID NO: 14741 - DNA, 420 bp, Glycine max
acttgatatggtctcaatgatagacacgaacatgtataaaattttatgtcttacatgtttttcttattattctaccttaaactggcctaggtttgaatttaatttctttttggaacatcatgtctattttgaaaatatatattcattcgttaaaagtgtcttctgtctgaaaaaattatgtcttatatagtttttcttcaaacaataactttgttttcttcataaaagtctcgagagatttctaaacatataattcaatccttcttgtgatattcgcctgtacaggtggtaagcaacacataacacagttatattaaacatattatgaatacaaatctataatatactatagtcatcacaatatgaaaatcatctaattatgaatacaaatgtatactatattatagtaatcacaataac

SEQ ID NO: 14742 - DNA, 316 bp, Glycine max
  unsure at all n locations
catgggcagaaatatgtcagcatttatagggtaaattgttcctcacattcctgagaaatgtaaggacccaggtactttctgtataccttgcattattgggaacagtaaatttgagaatgccatgctagatctaggagcatcagttagtgtcatgcctctggtcattttcaattcttaatctcttgacctttacaatctacagatgtggtgattcatttggcanatagaagtgttgcttaccccacaggtttcatagaggatgtgntggttcaggttggtgaacttattnttcctggttgattttatgttcttaata

SEQ ID NO: 14743 - DNA, 426 bp, Glycine max
cttgtgtgtaatcgattaccagacatgaaaattcaaatttcaaatctgaagagtcacaactcttcagaaactaactgtgtaatcgattacaacaattatgtaatcaattaccagtaaggaattttcgaaaataactcccaagagtcacaactgttcaagaagtttttgaatggctatcaaaggtctataaataggtgacttgggacatgaaattttgaaaaagagaattttcctgaacaaattgtcttatcctctcaataccaaattgtcttataactctcaaaaagaattccttggtcaaaacacttgcaaatttaataaggaatcttgagtgatcttcaattgtaatatttttctcttatagagagaattcttcttcttcttcttattcaaagagattgattaagggatcgagagtctctttgt

SEQ ID NO: 14744 - DNA, 401 bp, Glycine max
  unsure at all n locations
actaagcttccataataatgctaccactatttggggcttgctattccatgatacatgttcagaccctangaatngacatgtaccactagtactcttcctatctatttntgatccagcaaaatctgaatcagagtatcctactaggttgcataaagaattcttaggataccataatccttaactaaatgttcctaataaatatcttataattctttttactgccattaaatgtgaaaactttggatctgattgaaatcttgcacacatgcatacactaaacataatgtctggcctacttgcagataagtaaagtagagatccaatcatacctctgtattgctttggatcaacaggttgaccggattcatctttgtcaagataacaactcgtattcatagggg

SEQ ID NO: 14745 - DNA, 361 bp, Glycine max
ataaactgaattatactagcaaaggaatggtaagagatgttaaagttatatttatcaattatcaagactaagtacattatctcagatcacaccttcttgcttattcttatagggaaatgatcattttatggcaacataagtaattgaagccgtaaaggatacacctctactgccaattcagtctgggaaagacctgaactaaataactttccttgccaatgtaggtcaccgccatacctagtcaaggggaacaaagttaggcaactcattaaagcctagttaaagggttagtcatctaagttcgtgtaatatatcattaatataatatatcacttattacatcttagatgaactatatatg

SEQ ID NO: 14746 - DNA, 445 bp, Glycine max
  unsure at all n locations
ctatatatctaatttattttttttctgttaaaantcattgtcatataattttatattacaatttaattctatattattaaaaaaataaatattattcattttaaaatggttaatttttaaaaataataattatgatacactacctaattaagagaggaagnatcttacccataatagattaaaaatatatatttgagaatttatatagaaaaagtattaatggagcattaacaatgcataattggatagatgaagtggttatttttaatttgcggacttataattntacantaaattaagtattctacacgaaaatntactccaatggtaaagttgttaaaaatgagtgattaacataattntacatataccacaatcattgaaaaatgttatttttgttataaaaattgtaagcaatatggttatataaacaatattatatcac

SEQ ID NO: 14747 - DNA, 423 bp, Glycine max
  unsure at all n locations
tcttacctcaccaatagtnnttggggttggccattcatgaatggttntcttcttttcttgaccaacctgtactccctgtgagctaacaacaaaaccaaggaaaactacatggtccaaacagaatgcacatttatccatgttagcatacaagctcaaacgcctaagggccactaaaagtctcctcaaatgcacaagatgttcatcatggaattcgttgtaaatcaagatatcatcaaaataaaccacaacaaattttcctagaaattcctttaacacatggttcattaatctcatgaaagtgctaggagcattggtcaacccaaaaggcataaccagccattcatacagctcatatttagttntgaaagttgttttccattcatccccctctctaatcctaatttgatggtacccacttttata

SEQ ID NO: 14748 - DNA, 397 bp, Glycine max
  unsure at all n locations
gcgtctcgatatattacgggactctattagttattcgagtcaaaagntattggcatttgacatttcatagagcttccattttcaattccgagcgtctcgatatattaaagggctcaatcggacattcgagttaaaagttattgtcgtttgatttttctaagagcttccgttttcaattccgagcgtctcgatatcctatgggacacaatcggacatccgattcaaaagatattgtcgtttgaatttgctcagagattcagttttcaattacgagcgtctggatatattacggcactcaatcagacatccgaattaaatgttattgtcatttgactcttcatagagctctccgtttcaatttcgagcgtctcgatatatcacagggctcaatcggaca

SEQ ID NO: 14749 - DNA, 340 bp, Glycine max
  unsure at all n locations
aacttcatgagatgctagcaactggttgttcccagttgtgatgatgattttgctgtccggaccaaaccaatcaggtcttccagcaattgcttgtaattgcttgtgtatgtcaacatcatctagaatcaagagaaccttctttcccatgagcctagactgtatgattgaaattccttgttgcttacttgttaagttgatgttcatctctcctagtatttctgaaagaaggattgtttggaggtgttctaacccgtgtttgtttgacttttccctcacattngcaagaaaacacanacaatcaaacttctcagcaattatcaactatgaagcacggacacgt

SEQ ID NO: 14750 - DNA, 359 bp, Glycine max
actagcttgaggatgtgattgaagcaccggtatgtttttattggcaaaacccaccaaaaaaagctggcatatagtaaagaaagattctatcgctgcagtgaatgaatttttcgagaaaggatctttattataggattttaatactactctcgtgactctcattcctaaatctattactgctaagactgtcaaggattacaggcctattgcagtttgctctactttttataaagtgatctaaaattttttgactacgaggctagggatagtgatacaggatattgttcatactatccaagcaacttttgtacccggtcaagtcattcacaatcatattctccttgcaactgagctgatga

SEQ ID NO: 14751 - DNA, 399 bp, Glycine max
  unsure at all n locations
actcaagcttctagtccttgtggatcttcttccctctactgctagaactttttttgtatgtttagctngaacttcacctgtaacatcatcaggttctggttcacttaatatttctgcattgatatgcatcattggcttcttgcttggatcatgcttgtccttcatccatgtgttcagcttatcaaattggacatccttactaaaaactatttgattcgttcttggatttaagagtttgtatgaccctatgggattgtagccaacaaagatcatgtgttcactcttgtcatccaatttcgcccttgtttgatcaggaatatgtctgtaacatgttgaaccaaaaactctcatatgcttcacagatggtgttttccctgaccatacagcttctggtacttg

SEQ ID NO: 14752 - DNA, 390 bp, Glycine max
  unsure at all n locations
ctaagcttattaatggttccttactntgagagggaaatcttctacttaccacgcatcnngnnnatgcacaaacaggcagcatgggcgtgctggtacttgctggggatacaaagggcagccaagtgtctcaaagtgcagtgtgcgaaaacaagtggttgtggcatgaaaatcctgtcttgtcaaacgcctatatattacggaagcaacagtttgctagttagggataaggcatggttggcttgggcagagaacatggaagtgagacacacatgcctaaatggtcctgacagctacaactatggagcttatagatggactgttcaacttgtcacaaacgataatcgattggaaaagatacttttccctatcttcttgggcctaatgactctc

SEQ ID NO: 14753 - DNA, 439 bp, Glycine max
  unsure at all n locations
actcagcttctggagccattcaaaacaatcaatttgatgccatctagacgaagaaatacgacttcattatgaagatgccaactttgctctaggtcatgtcctttggcctgaaaaatgcacgcgttacataccanagattaatggaccaaattttcaaacagcagatcgaacaaaatgtcaagatctatgtcgaagacaagggtgtcaaatcctatagcatagtccaacatgtggcagacctagaagaggtattcggagaaatttacaaatacaacatgtgccttaactcgaanaaatgcactttcagggtcggcggaggcagattcctcttcatgatcacacatctgggaataaaagtcaaccctgacaaatgcataggcatactggcgatgcatagtcctaccaacatccaagaagctcaaatgctgaatggtagact

SEQ ID NO: 14754 - DNA, 406 bp, Glycine max
  unsure at all n locations
ctcactcaaggtaataagagtgtagangagnactttaaagagttggaggtgtccttgantaaaggcaatttagtgaagatcgagaggctactatggcatgtttcttatatgggttgaatagtgatataagggatgttatagagttgtagaattatgtggagttgaagaacttagtacatcaagttgctaaggtagaacaacaattcaagaggaaggacagagataagaataagtgaggtacttcttcaagcaattctattgctgcacctcaaagggctaaaattaagtccaatgagtcccctaaaaaagacaaggagtaatgaggtaaaatgcttcatgtgtttacggagaggtcacatagctatgtagtgtccaactaagaaaattatgttacttaaggatgatt

SEQ ID NO: 14755 - DNA, 285 bp, Glycine max
tccactcagtctcccttcttcctaaaggagcatccctcagttagccttgcccggccaccggttggttgacacaagacagtctggcagtttccgcatacaacaacagtctgagagtggctaaagacagtggttctgcagtcatattcataccactcaagtattaaaacaaatccacaatcaaattcataacactcgagctattttatgtacacaatcaaaatcaataatatgaagggaaaaaaagacgatccaacttacattgtgaagcaaccctggcacttaaca

SEQ ID NO: 14756 - DNA, 469 bp, Glycine max
  unsure at all n locations
ntctaacanaaaatttcatgcaggtggaccttcttctagtttatttgacttactgcaggctcatatccctcttccattctcacctagagcaattccaaacaaaaaaatggaagaagcgcaaaaggagatcttggagaccttcaggaaagtagaggtgaacatacctctgctagatgccatcaagcagattccaagatatgccaagtttctaaaggagttgtgcacccacaaaaggaagctcaaaggcaatgaaaggattagcatgggcagaaatgtgtcaacattgataggtaaatctgttcctcacattcctaagaaatgtaaggacccaggcactctttgtataccttgcattattgtgaataagaaatntgagaatgccatgctagatctaggagcatcagttaatgtcatgcctctgtccattttcaattctttatctcttggacccttgcaatctatagatgtg

SEQ ID NO: 14757 - DNA, 469 bp, Glycine max
  unsure at all n locations
atactgaactataacctataaagataccaagnncaacttttcttgtctagcttgtctctcttaatnngaggcacataagtaaaacacaaacatctaaatacttgaaattttttcaagaagggtttataaccataccaagcctaaaaaagagtctttccatctattgctttggtggaaagtctatttagcaaaaatattgcagtgtttatagctttcacccaatatgccttaggtaactctttctcatgaaacatacacttgaccattttcatgattgttcaattctttctttcactaaccctattttgttgatgggtgtaaggagctgttaattgctcaatgcctgcttcctcacaaagcatggggaattgtgttgaagtgtactccttaccattatcagaccttanatcttgaatcatgcagtcactntgcttttcaatctagtgcttaaatctccaaaatacacttg

SEQ ID NO: 14758 - DNA, 425 bp, Glycine max
  unsure at all n locations
ttcctcagggggagagataacattagcaatgtattaatagcattcaagatagaaaattttatgtactacatataatgaaatgacagacgttatttctgaattcagctagcactacaattcatccgtacgttaactaatatcttaattaatatcacacaggcaaggcacaataatcttttatatcttaattaatatttatttattctgaaagattcttttagttggatataaaaaaatgattnttttagtacaatgaaacaaacaagcacaaattgataaaaaaaaacctcccatatataattataataatattatattaaattagagcgttntaggagctactatttatattaacaataacactcgaaatatttttttagagacnattccgaagatttcttaactttctatatggatccatctat

SEQ ID NO: 14759 - DNA, 346 bp, Glycine max
gagacgctcgaactggaataccgaagctctgagcaaattcaaacgacaataactttttactctgatgtctgattcagccccgtaatatatcgaaacgctcgatattgaaagttgaagctgtgagcaacttcaactacaataactttttactcgggtgtctgattcagaccaataatatatcgaaacgctcaatattgaatggtgaagctttgagcaacttcaaacaacaataacttattactcggatgtctgattgagacccgtactatatccagacgctcgacattgaataccgaaactcttaaaaaaatcaaactacaataactttttactctgaagtcagatt

SEQ ID NO: 14760 - DNA, 276 bp, Glycine max
tgcagcttgtcacgaagtttctgcatttctccctataagaatgcaatttaataataagcgggaagccaagccaaatgtgggaaattaatataaaagaagaaatataagcaaaaagagtcatggaagtcaagaactcaaccactaaattcagatgaattggcagagtaaagcaaaaaaatattacctgcaagaatcgacgttcttcaagccactgtttgacaggcatcactttatcattagcatctttccattcatttgcaaccacaacagctactc

SEQ ID NO: 14761 - DNA, 226 bp, Glycine max
ttgtttggctgatttaaagcatttgaattacttggacttgagcgggaatagatttcttggagaaggtatgtcaattccttcttttcttgggacaatgacttccttgactcacctcaacctctctcatactggattccgtgggaagattcctcctcagattgggaatctctcaaatttggtgtatcttgacctgagttatgtttttgccaacggaacagtaccctct

SEQ ID NO: 14762 - DNA, 265 bp, Glycine max
taatatttgaagattatccttgtggaaccttcacccaacgaagacactgacaaaaacttatcttctcctttttggacaaagaatggcaggctgggggcaagtaaattttcttcccatcagaccttggatgcaactgtgatcgtatgcccatataagctagatcttgacgggtattcaagccatccttcgtcttgccttgaatgttaaggagcagcccaatcacactgtcacaaacatttttctccacatgcataacatcaataca

SEQ ID NO: 14763 - DNA, 289 bp, Glycine max
ttggatttccttttaatagggaatctatccttcctaaaatggagccaaacccaatcacccttattaaaaactagctcttttcttcctctattgcctttaagtgaatacacctttgtttgattctctatttggttcttaaccctctcatgcatcttctttacaaattctgacctagattccccttctttatgtataaaagaagtgtccagtgggaggggaatgaggtctaacggtgttaggggattgaacccatagacaacctcaaaaggggactgcttggtggttctat

SEQ ID NO: 14764 - DNA, 262 bp, Glycine max
tttgcatgcaagcttaacccctatttctttaacccaaaactctaaaaactaaaccctaaactctaaggcttagacaccaaaccctaaatttgaaaacccgaaacccttaacccaaccttttaaagcccttaaccctaaaatataaaaaataaaccctaaaccctaatggtttagacaccaaaccccaaacctcaaaaccctaaaccataaacccttaaccctaaattctaatccctaaaccctaaactcagaattctaatac

SEQ ID NO: 14765 - DNA, 244 bp, Glycine max
acaacattcctggcgacatctcaaaaggggtcaccactatacattatctcaaagatttatgcaaaacatggcttttgtatctatgaaggaacctaagaatttaaatgaagccctcatatatgaaaattggataatatctatgccggaagaactataccaatttgaaagaaataatgtgtgggagttagttgagaaacctgaacgctacccaatcattgggacaaaaagggtgtttagaaataaa

SEQ ID NO: 14766 - DNA, 292 bp, Glycine max
  unsure at all n locations
ataaatgagataagagatgagagaatgcggaccttgctctatactggttcggcngaggccgtgcttacttccaatactcaagcaacccgcttgagattatcctttctctttggtaattcctttacaacttctgaaccacacagggacaactcatcccttgtgttgatgaattcttacaacttaagagaccctcagtcccttaatcaatctctgtgaatgagaagaaagaaagaagaactctctcttgaagaaaaggatattacaattgagagccatggagaaactcttaatg

SEQ ID NO: 14767 - DNA, 440 bp, Glycine max
  unsure at all n locations
gagtcacctcgcggcatgcaagcttgtgttgcanaagttgatggtattcatactaagatgggtttgcgcttagatgtcattactaggtggaattcaacttttctgatgcttaagagtggccttgtatatcgatgtgctttttgtagtctttcatttgatgataggagctattcaagttgtcctactaatatagaatgggagagaggacaaaanatgtgtgattttttgcatcctttctttcaaatcacagagttgatatatgattcctcttacccaacatctaatttgtatttcatgcaagtgtggaaaattgaatgtttgttgcttcaaaatttgagtaatgaagatgagttgattagaaccataactattgatatgaaaacaaagtttgataaatattggagtgattatagcaatgtgctttcctttgggtgcattct

SEQ ID NO: 14768 - DNA, 462 bp, Glycine max
  unsure at all n locations
cagaactactcaacaagctagaatcttataatatattataatatattaatgtttgaaaaatcaatgtaaaaattctacaaaaaatagagattaaaaagaaacaatttagaagaattanaattattcttcacatacataatataagacttggtaaccggtatacgcactattttcctccagaactaattttcttaagtcaaacaccttaaacttgtaagttgaagttntttgtgtccatgtgtggaaaaggataaaatgtaaaattaagttatcagcttatattgccaacttaatatgtatcaataaaaaattaagttaactaacgttatatcttacaaaattctaattctcaaaataaaaagtgagtatatgtatgtatattaattagtngcataaatactactatgatttacanaataataatcaatctagtaagggacgtatatgtatgtatattaatta

SEQ ID NO: 14769 - DNA, 211 bp, Glycine max
  unsure at all n locations
atgacaatacttacaaagntgagctgcccggtgagtataatgttagttccaccttcaatgtctctgatttatctctttttgatgcagatggagaatccaatttgaggacaaatccttctcaagagggagagaatgatgaggacatgaccaagagcaagggcaaggatccacttgaaggaattggagggcctatgacaagggctagagcaag

SEQ ID NO: 14770 - DNA, 376 bp, Glycine max
  unsure at all n locations
agctnggagcagtggaacacggngtggatttttgcagtttacgcaaggctaagcgataagatacttttcccactaattcgatgatctgataggggccataaaaacgctttcctagttttgaaacttatcagcgatcgaagtttggcggtaaagtcttagcttcacatagacccagtccccaattttgaagttgacttcttgacggtgaggatcagtagagttcttcattcgtgcctgagatcgttcgagtttttgacgaagggcatcaaacatatcttggcgagtggtaaggaggaagtccacagcctcgactgatgatgaaccaggaaggtagtccgggatatcgggtnggtggttcccgtacattacctcgtat

SEQ ID NO: 14771 - DNA, 463 bp, Glycine max
tctctctttcacctagtttttcattttttcgcatacacccaaatttgtcccagtaaaactacgatcccaaactcgttaaccgttggatcatcgtcaaagttgaacattaggttggaaattatattcacacatctccaccattgggatttgaaaaataaggcctacggagggagaattgctcatcgcacacagacagtgcaacgaaggttataatcccttcttcttctctctaacacttgaaaactctagcaagaggaaacgtttggggaatcttaggaaaccactagagatttctctcactatcaaactacactcatgagcccacttagaggtaagagatgagtttatcgcaattagggttagaatgaacatttgtagggatccgtagaggatcaaatttaggtttaatttgggatgtttattggattgtaattcttctagaaaatggttgaggagttttact

SEQ ID NO: 14772 - DNA, 444 bp, Glycine max
  unsure at all n locations
tgatatactntagctcnttgcttattaagcttgtaatnnncataatctngaaaccttaattcctccaattgatgaagttgtagcttcctatgttcacctgctgcatttagatcaaaattcaaaatcttcaatgctcaataggctttgtgccccaactcaataggtaagtgacaagttttgccatagataaattggaagggagtcagtcctataggagtattgtatgcacacgtagctttatctaatntttgagactagtccttccttgactgagcaactattttctccagaatcttcttgacttccctattagaaactttagcttgcccaatggtctatggatggtaaggtgaggctaccttgtgtctaacactatagtgttggagaactttcttgagttggatgttatagatatgagatcctctatcacttataaagtaccct

SEQ ID NO: 14773 - DNA, 398 bp, Glycine max
agcttcaacctagaggagacgatctcttccatgtgttggagaagatcaacgacaatgcctacaagattgacttgcctagtgagtataatgtaagtgccactttcaatgtgtctgatctatctctttttgatgcagatggaggagccttggatttgaggacaaatccttttcaaggagggagtgatgaggacataaccaagggcaaggaccatgaagcacttgaaggtcccatgaccagaggcagacttaaacaagcccaacacatcatagagacaaggctggtcatttgtatagctgtcattgatgatgattgaaggcccaagtggagaaagatgaaggcccagaggcagaggcactaccaagactactaattgttgctgaaggcccaaactaacttg

SEQ ID NO: 14774 - DNA, 439 bp, Glycine max
  unsure at all n locations
tgcaagcttgcccaacaaataaggaaatnntcttaattctctgatacttaatttatcttgtttgccaacaataaaaactgtcaaagtacgaagatattgtagtctacagatttgtgttgccatctctggaaaattagtgtaactgatgtccaggtggcgtaaattaaccagatttcctatcggtcgtggcaactgaataagaaattcacaatttgataatatcaaagtttgcaaattgtaaagcataaatgtttcataggacaagctttcaatggaagtgtaagaaagatccagataccacaagtgcaacaaattgccaatggaatcaggtaactcaatgatatttntatatttagacaacgacagtatacgcaaacatctcagttttggaaaccaaccatgataagtgcataaattaaaatactggtttcaagggtac

SEQ ID NO: 14775 - DNA, 297 bp, Glycine max
  unsure at all n locations
agctacaaccgattatgttaccgcgaattatgtcgagangacccgtgctaccatcgactcgctagccatgggtaggagctcgctacaagacaatgataaacatgcatgtaaacaccataccgttaataggaatagaagattaacatatgaattgacgaggagtgcgggctgaacactcatgcggttgttgagccattcgccatagcaacaaataggcatctgagtgtggttcaccctaattacaaacttttgttttctcactatcgcgacaccatgaatattaattcactcgcccgc

SEQ ID NO: 14776 - DNA, 472 bp, Glycine max
  unsure at all n locations
ctggaactacttcacatggacttgatggggcctatgcatgttgaaagccttggaggaaagaggtatgcctatgttgttgtggatgatttctccagatttacctgggtcaactttatcagagagaaatcagacacctttgaagtattcaaagagttgagtctaagacttcaaagagaaaaagactgtgtcatcaagagaattaggagtgaccatggcagagagtttgaaaacagcaagtttactgaattctgcacatctgaaggcatcactcatgagttctctgcagccattacaccacaacaaaatggcatagttgaaaggaaaaacaggactntgcaagaagctgctagggtcatgcttcatgccaaagaacttccctataatctctgggctgaagccatgaacacagcatgctatatccacaacagagtcacacttagaagagggactccaaccacactgtatgaaatct

SEQ ID NO: 14777 - DNA, 449 bp, Glycine max
gcaagcttgtatgttagacctcgatcggtcatcttttctggccgacgccgactgtcatttttttcgatcaatatcggtgaataatatttttttgccgaggtgggctaatgttttcctggccgaataaatgggaacatgccagtttcggccgaaacgaaacatcggttgagctcgcacgaaaaaacctagccgacctacattgtaagttttttatgcaacaccgaaaaaaacaaaatttcccctgccgtaagaaaaaacattatcggccagcgagcgcgggacttgaaattcaagctccaaaaactaacccaaggcaacaagggggttgaggagtatttcaaggaaatggatgtgctcatgattcaagcaaatattgaagaagatgaggaggtaactatggctcgatttcttaatggtttgacttatgatatccatgatattgttgagct

SEQ ID NO: 14778 - DNA, 225 bp, Glycine max
  unsure at all n locations
agcctaccatcctcagtctgatggccntattgaatggaccatgtagtcgctggaggagcctttgagggcgtgtgtcttatagcaatagaggagttgggagagttttctatcgttgatagaggtcacttataacaatagttttcactctaccattggcatggctccctatgaagctttgtatggtagaaggtgtaggacacctctatgttggctaaagcccggaga

SEQ ID NO: 14779 - DNA, 261 bp, Glycine max
agcttttttttcttgaatcttcttcatcaatggagtcatttacttcttgaagatcaattgcagcggaatggaaatggaagaaagatgattggagacgccactttaaggagaagatgagtcaagaagaagctcaccaccataggaagccatgaataagagcttgaaggtaggagaagatgagtggagggagagggagagaaggagcacgaaattttgtgcctcaaatgaagtctgaactttgaagtgtaattctcaaatgat

SEQ ID NO: 14780 - DNA, 288 bp, Glycine max
accctctagaggcgaactgtttgcatgcacccgctgttttctaacgttttaaggcgcaccccatattccgtggtcatatgcccaacttgagcccatatttttgaagttgtttatggttttaacccactaactcctcttgatcttttgcctatgcctaatgtttctgtttttaagcataaagaaggtcaagcaaaggcggactatgtgaagaagcttcatgagagagtcaaagatcaaattgagaggaaaaattaaagctatgctttacaagccaacaaagggagaaag

SEQ ID NO: 14781 - DNA, 252 bp, Glycine max
ttctttcatgaatacttgttacccaatctcttccttcactattgaagaagcatgcaatgggtaaaaagaagtccttttgagaattatctaagccatcataccttaattttaatatggcatgaatttttggatttggaatatttcggagttttggcaattcacttttccatgcctctttacttcttacttcttgaacgaagatttgaacccagaacttttaaagccaaaggaataccttcggaataagaaatt

SEQ ID NO: 14782 - DNA, 252 bp, Glycine max
ttcttttagtctctcagaagaagacggtgggcagaaagaggatatttttgctctccaaactccatgctcccaacaaatgaatacaaatttgcgtttgggtcttcacattagatgacggctctataatcatggaatttgaagtcctcctgtaaggaagaagttacatccagcccttgttttatcttcaagtttgtctcaccatccaagttcatggtctcaacatagcaaactgcatcctcataactggaggaa

SEQ ID NO: 14783 - DNA, 438 bp, Glycine max
  unsure at all n locations
aggtctcanattcgagtcctaactcttaagtatataatgcattaaataattaaaagaaaaattntatcattcataataatcctactcaactaaaaaaaatactcataatcttaacaaaatgtaatgtagcaagtcataccattgaaattaaagtccaaacaatataccatgtctccttgaaattaaatagactgagccaattgcagtattgtacattntctattctatagattttntatctttgtttctcaatgataaacaatgataaaaatatagacttttcacctttatcgttatcacacgtatattgttgaagaactcaagggactgttgcgcttaaaattcaaaacacaaatacaattctaatatcacacaaattcatttttaatcaatttaacaaatccccaaggaaataatagtcaaacatagcgacaaatc

SEQ ID NO: 14784 - DNA, 301 bp, Glycine max
  unsure at all n locations
gcttcattctcgtggcgatagaatatntcaccatatgggtcanagtgacttcttataccaatgtcacgaggagtgtggtggtcagattcataaagaaggaactgatttgtcgatacggactccctatgaagatcattactgacaatggcaccaatctgaacaacaaaatgatgcaagaaatgtgcggggatatcaagatccagcatcataactccattcactatcgaccaaagatgaatggngctgtggaggatgcanataanaatattaataagattattcagaagatgacggtgtgata

SEQ ID NO: 14785 - DNA, 301 bp, Glycine max
  unsure at all n locations
aattcaaacagccataacttttgacacgagtgtatgtatgaagcccatgatatatcgagacgctaaaaaatgaacaacgaaagctcttgagaaattcaaatggtcataactcttcacttggatgtccaattcaggcgcacaatatatcgggactctcgaaatgaaaatggaagctcttggcacattcaaacggccataacttttaacttaggtgtatgtgtgaggcctangatatattgagacgctgaanaatgaacaatggaagctctcgagaaattcaaatggtcataacttttcacat

SEQ ID NO: 14786 - DNA, 472 bp, Glycine max
  unsure at all n locations
aagattcctaaagaagctagagcttagctacacatacctctctaatagctaagctcacacccnctataatagctaagctcacccccatgacaaaaaacatgaaaatacaaaaaaaagtgcttactacaaagactactcaaaatggcccgaaatacaaggctaaaaccttatactactagaatggccaaaatacaaggccaaaacgaagggaaaacctattctaatatttacaaagataagagggctcatacttagcccatgggctcgaaatctaccctaaggctcatgagaaccctagggccttcccttggatctctagcccaatctacttggagtcttctacctaatgcccttgcgggataggattgcatcattccctccagcttggagaggatttgacctcaaatgccgaggttcttcatactctgggctacttccctcaacacctgtaaaaagaacaaaaacatatgta

SEQ ID NO: 14787 - DNA, 409 bp, Glycine max
  unsure at all n locations
tataaaactcaactgaagcaactggtgcgttggtaacttggaacccagctgttcttgaatcagaaatctgtacctgtcgcaagggtttgtggttngtgctcctctgctgaccaccatacagacctttgcccttccatgcagcaacctggagcaattgagcagcctaaagcttatgcagcaaatatatacaatagacctcctcaacctcagcagcaaaatcaaccacagcagagcaattatgacctttccagcaacagatacaaccctggatggaggaatcaccctaacctcagatggtccagccctcagcaacaacaacagcagcctgctccttccttccaaaatgctgctggcccaagcagaccatacattcctncaccaatccaacaatagcaacaaccccagaaac

SEQ ID NO: 14788 - DNA, 430 bp, Glycine max
  unsure at all n locations
tgtgatcgattacacaccatactgtttcaattaccagaggagtatttcagactatattctcaattgtcacatcttntcagttggttcttgaatggctatcacaggcctatatttatgtgacttgagacacgaatgttctaagagttnttcagaacaaataggtcttatcctcttacaaaccacaatcattttatcctcttacaaattccttggccaaaacacttgtgattcaataacgaattatttgagtgctcacattgttcaatctatctctctagagagagatttcttcttctcttcttctttattctgaanagggattaagagaccgacggtctcttgttgtgaaagaattctaaacacaaaggaaggattgtccttgtgtgtttagaaattgtanaaggaatttacaagatagtggaactttcag

SEQ ID NO: 14789 - DNA, 325 bp, Glycine max
  unsure at all n locations
acagagatgccagtctaccattcaactnttagacttccttgatgttggtaagggtgtgcatctctagtatagttatgcanttgtcggggctgacttctattccctgatgcgtgatcacgaaacctatgaccttgccttcgtcaaccccaaaagtacattttttgggttgaggcacatgttatatttgtggatttcttcgaacacctcttctangtctgccacatgtanggctatgccataggacttggcaaccatgtcgtcaacatagacctcgacatttcgtctaatctattgtttgaagatctgatccatccgtctttggtat

SEQ ID NO: 14790 - DNA, 286 bp, Glycine max
  unsure at all n locations
catccgagtaaaaaagtgattgtcgtttgaatttgctcatagcttcaacattcaattntgagcgtcttgatatattacgatactcaatcggacatccgagtaaaaagttattgtcgcttgaatttgttcagagcttcggcattcaagtccgagcctctcgatatactacgggactcaatcagacctccgagtaaagggttattgtcgtttgaatttgctcagagcttcgacattcaagtccgagcgtctcgatatattacgggactcaatcagacatccgagttaa

SEQ ID NO: 14791 - DNA, 456 bp, Glycine max
  unsure at all n locations
tcagaccactatcagtgtgctggaactacttcacatttacttgatggcgcccatgcaagttgaaagccttggaggaaagaggtatgcctatgttgatgcggatgatttctccagatttacctgggtcaactttatcagagagaaatcagacacctttgaagtattcaaggagttgagtctaagacttcaaagagaanaagactgtgtcatccacagaatcacgagtgaccatggcagacagtttgaaaacagcacgcagaatggcatagttgaaaggaaaaacaggactttgcaagaagctgctagggtcatgcttcatgccaaagaacttccctataatctctgggctgaagccatgaacacagcatgctacatccacaacagagtcacacttataagagggactccaaccacactgtatgaaatctggagagggaggaagccaactgtcaagca

SEQ ID NO: 14792 - DNA, 413 bp, Glycine max
  unsure at all n locations
taatntacaaccagaatggtgaagctgttaataaagatgaaggtgatatgttttttctctatggatatggaggtacaggaaaaacatacatttggaaaacacttgcaagttcactgagagctgacaataaaattgtaataatgatagcctctagcggcatagcttctctgctattgcctggaggtagaactgcacattcaaaatttaaaattccagttccagtttttgaagactcaacttgcaatatccatcaaggaactcaattagctgaactattaaatcagacaagtctaatcatttgggatgaagcacccacgactcacaaattctggtttgaggcacttgatcacagtcttagagatatcatcaaacacaactcanaggacagtaaaatctttggaggtaaagtcatg

SEQ ID NO: 14793 - DNA, 323 bp, Glycine max
tctgacattcaccacatattctgtcttcttctatttttagaatgggaatgcctctaacagcacctttgtgaatgatattcttcatgcctcgtaagcgcagatggccaaatctatgatgccatattctgactccatcttatttggaggatagacatgtggaggagtaactagtttcttgaggtgtccatacgtaacaagtgttctttgatctgctgcccttcattagaacttcactcttattattagtcaccaagcattctgactgtgtgagagttacattgaatccttcatcacacagctaactgatgctgatcaagtttgca

SEQ ID NO: 14794 - DNA, 473 bp, Glycine max
  unsure at all n locations
acacctctctaatagctaagttcacctccttgagatgagaagctagagcttatctacacacccnctataatagctaagctcacccatatgacaaaaaacaagaaaatacaaaaaaagtccctactacaaagactactcaaaatgccccgaaatacaaggctaaaaccctatactactagaatggccaaaatacaaggcccaaacgaaggaaaaacctattctaatatttacaaagataagcgagctcatacttagcccatgggctcgaaatctaccctaaggctcatgagaaccctagggccttcccttggatctctagcccaatctacttggagtcttctatccaatgcccttgcggngtaggattgcatcaccctcatatatttttcccaaggccaccaagtgtgtagaatgatcacgttgcacatacaatcccataatcggtataacaatagcaacatcttcttcccctg

SEQ ID NO: 14795 - DNA, 424 bp, Glycine max
  unsure at all n locations
agcccatgtgcttgattcaatattgattcaagacttcaagatcaagcatcaagaatccaatccaagattcaagagaagaaatcaagaagcaacaagtcaagacttcatataggataaatattaaaagaatttttcaaaaaccaaatagcacagntttggtttacaaaagaattttctcaaattttctatggtaccagagtgattactctctggtaatcgattaccaattggcattaatcgattaccagtgaccagtttggttttcaaaatgttttcaaatgatttataattntccaaaatgattntcaaatagtgtaatcgattactatattagtaatcgattacaagtgaatctgaacgttggaattcaaatccaattgtgaagagtcacaacttttcatataatacattgtgtaatcgatta

SEQ ID NO: 14796 - DNA, 321 bp, Glycine max
  unsure at all n locations
cgaatggtcataactnttcactcggatgtccgattcgcgggcataactcatctagatgctcgaaattgaacatcggaagctctcgagaaattcgaatggtcataacttttcacacggatgtcccaatttaggacataatatatcgagacactcgaaattgcacaacggaagcactcgagaaattcgaatggtcataacttttcacacggatgntccgaattgggacataatatatcgagacgctcgaaattgcgctacggaagcactcgagaaattcgaatggtcataacttttcacacggatgtctgattcgcggacata

SEQ ID NO: 14797 - DNA, 417 bp, Glycine max
  unsure at all n locations
tctcgatatattatgaaccttaatcggacttccgtgtgataagttatgaccatttgaatntcttgagggctttcgttgtgcaatttcgagcgtctcggtatattatgcgcctgaatcggacttccgtgtgacaagatatgacccattgagtttctcgagagcttccgttgttcaatttcgagcgtcatgatatattatgcacactgaatggacttccgtgtgacaagttatgaccatttgaatttctcgagagcattcgttgttcaatttcgagcgtctcgatatattatgcgcctgaatcggacgtccgtgtgacaagttatgaccatttgaatttctcgagagcatccggtgttcaattcagagcatctcgatatatgatgcgccagaattggacttncgtgtgacaagttatta

SEQ ID NO: 14798 - DNA, 489 bp, Glycine max
  unsure at all n locations
tactcagctgaagaaatatttgatgatgccaaggaatntaagaattatttttatgatgccaaggaatttcaaagatcattccagatgaatttcaaggatgaagaaagcaagatgtcaagccaagcaaagatcttaagataagaattaagatagactcttagaanagtttttgaaaagcacaaatgattggccaagtgagtttctatcttaacaaaaacttttccaagcattntactctctggtaatcgattaccagaggttgtaatcgattaccagtggccacaaagctttctggaaatgttatcaaagttattttcaaagttttcaaagctataatcgattaccaaaactatgtaatcgattaccaatgctttaaaacgggtaaaaatgattntgtcatgtgtaatcgattactagagcttntgaacgttggacatttgaattntgaacaaaaataattgtgtaatcgattacgccaatgctgtaatc

SEQ ID NO: 14799 - DNA, 494 bp, Glycine max
  unsure at all n locations
gctgcatgtccaattccatttgatgaagccaatntgtggaaaggccaaagtggacctgatctaaaacagataattcaacaacaatttagaaacatcaggtattacttcaaactagtggaagtggactgagctctgtctagctaaatattatccattaataacttgcagggctttgttgtggcttaatctcttgtaagcatgcatcatactgctaaaaaatgacaattgattaccaatgattcgtagtaatgcttacaaaaccatttttgtggaaggaatcatagtatatataggttggattctatctaaaatcccatcattgatatttttagtcctacagtatggnttttcttttcattttgagatttccacatactgatggatgctaaatnnnggttggttatctggactctttgattgctgatctaatctgaacataagacaactaaatgaccactccttttacttgntctccatttattattctattactg

SEQ ID NO: 14800 - DNA, 449 bp, Glycine max
  unsure at all n locations
tctaatcctgagggttatggtgcttncttggngatttcaatatcattagaagccaggatgaaagaacaggctcatctcanaggagtgtgggcacatataatggttttggtttcaatgattggatatcagacatggaaattcaggaaattaaaagctttggtagcagatttacttggtgtaggccaaatggatatgtgaggagtangctcgatagatgcttggtttcagaacagtggctacttaaatggcctgattcttcacaacaagtactccacatggattattcttatcactgtccaattattttgaaaacagatctggtggattggggccctaagccatttagggtgatggactgttggcttaaaaataaagagtatcaaagactggttaaagaagtgtggtgtggtgaccaacaacttggatgggggagtattgtgcttaaaaac

SEQ ID NO: 14801 - DNA, 416 bp, Glycine max
  unsure at all n locations
tattcttntaatgaatttaaccaatataanattgtttaacatattgtgtatgttattaacacttctattaagattatatattttcttaattaatcatatgagaatctttaattagaaactactttgtgcgatgcacatattagagtgatacaaatgttagtttcagagcagtaaagataatacatatttttaaataagaatgtagaacaaaaactataaaaaattgttttaacaacaatacaatctaaaaataaagaaatattttcttgaataaacatccataaaatcttagaatttttagacatgttctcatttcaatgataaaaaaagaagacctgttctcattantttctaaccaaatttttagaccatactggaatgcattataaaaaaagtaatgtgaataaatacatgtc

SEQ ID NO: 14802 - DNA, 393 bp, Glycine max
  unsure at all n locations
tctacattcaatntcgagctgttcgatatattacgggactctatcggacattcgagtaaattgttatggagatagaatttgctcagggcttccgtattccatttcgagcgtctcgatatattacgggactcaatcggacatccgagtataaagttattggtgtttgaatttgctcagagcttcagtattccatttcgagcatctcgatatattacgggactcaatcaaacatccgagtaaaaagttattgtagtttcaatttgctcagggcttctgtattccatttcgagcgtctcgatgtattacgggactcaatcagacatcccgagtaaaagttattgtcgttagaaattgctcagagcttctacattccatttcgagcttttcgatata

SEQ ID NO: 14803 - DNA, 252 bp, Glycine max
  unsure at all n locations
agacatcatggaaagcatcaagatagttgcaattgttcacatagatngtgaaggcctcanagaacaccttcattgaaaggtaatatgtattacactatatttattgatgacttcaccagaatgtgttggatttttttcttcaagttcaaatcagaggtggctgaaattttttggaagttcaaagtcaaggtagagaatgaaaacggtctcaagattcaaattttgaggtctgacaatggcaccgagtacaca

SEQ ID NO: 14804 - DNA, 423 bp, Glycine max
  unsure at all n locations
attgaagaatatgcttcctgactataacacgtttcccaagaattattacgaggcaagaagatattatgtcttgtgggtatggaataccaaanaatacatgcatgccctaatgattgtattntgtatagaaatcagtttgtcgaaattcgcaactaccctacatgtgggctctcaagctacaaggtcaagtatgacgaatgcagtgatgatgctgccactaacaaccattgtccaaaaaaagtgtgttggtatcttccaataataccaaggtttaagtgattgtttgctaatgcagatgacacaaaaaaacctaacatggcatgcagatggtaagaaaaatgatggatntctccgtcatcctgctgattctcctcaatggaagacaattgatcagttgtatcttggatttgataggatcctata

SEQ ID NO: 14805 - DNA, 311 bp, Glycine max
  unsure at all n locations
taagctctgtatactgcacaaggctcttaatattagaagagtattcttgaggaaccttcacccacgaagacactgacaaaaacttatcttctccttttcggacaaagtatggcaagctggaggcaagtaaattttcttaccattagaccttggatgcaactgtgatcatatgcccatatcaactagatcttgacgggtattgaagccgtgcttcgactggccttaaatgttaaggagctgtccaatcacactgtcacaagacattttccccacatgcataacatcaatacaatgtgtaacgtcnagatcag

SEQ ID NO: 14806 - DNA, 304 bp, Glycine max
  unsure at all n locations
atctccttcttcactacatcaagaatctccgggttgttgtttctctgtggctgnttactggtttagctccatcctctaaatttattcgatgcatacatgtggatgggctagtaccaggaatgtccgccagggtccaacctatagccttcttatgcttcttgagaacagacaacaacttctcctcttgctcatcactaagggaggcagatataatcattggaaaacatttgctatcatccaaataagcgtattttaaatttgatggcagaggcttcaattctggtgtgtgtggctgggtagaggt

SEQ ID NO: 14807 - DNA, 416 bp, Glycine max
  unsure at all n locations
tgtagggtaaagtctcacgaatgtcacgtgctcatgcaacttttgttagtcgtggctatacgagacatctgccaaacaaagtcaggttaacgataactcacctatgctntttcttccattctatatgtagcaaagtcattgatccagtcatatntgatgagttggaaaatgaggccgcaattatactgtgccagttggagatgtatttcccccttgctttctttgacatcatgattcacttgattgttcatctggtcagagaagcagaagaagccattgaattttgttcagaatacttagagaaggctaaacctgttgggcttcctgagtctcggcatgatgacagagtgggtgggaaggggtcaagaggactgcangtgatcacttcaagtgtagaagatttgttacaagctcac

SEQ ID NO: 14808 - DNA, 485 bp, Glycine max
  unsure at all n locations
aatactcaagcctaaatggtggaatgaaaaanaagtntgtatccagacaagagttatcattttcatacctaattttgctggggaattgtaacctcatttgctttcttatcaaagggacttatgttaaattcttaatgaagtntggtcacagtaactcttgttttagcgtcatgccaacagttgaaatagacaggaaaagagtaatgaggaaacaactgacattggaagtattttaaaggaaagcaatgaagaagtcacactagttatcttacatcaggaatgaaactgttatgaaaacataagaaatacctcaaatataggagagaaactcacanaatactaacctctcttatctgtggttcanaacccatatcaagcattctatctgcctcatctagaacaacaaaagaaattctggagagggaagtgttgccttgttgtaaatgatcaatgaatcttccaggggtggcaactgctatttcaac

SEQ ID NO: 14809 - DNA, 355 bp, Glycine max
  unsure at all n locations
acttagcatcaaattttcctaagttatcttttcattattcaatacaaaacatttacaaccaaagatatgaagatgtgagatgtttggttttctgccattgaacaattcatatggagttttatttaaaatgggtcttattaaagccctatttaaaatgtagcatgcagtgttaacggcttcagcccaaaaatattttggaagaggagtatcatttaataaagttctagcaatctcttccaaagatctattnttcctttcaacaaccaccatttgntaaggggttcttggtgcagaaaagttatgctcaatcccatacttatcacaaaatagttcaaattctttattttcaaactca

SEQ ID NO: 14810 - DNA, 354 bp, Glycine max
  unsure at all n locations
tttctttacaattgcatcacctctcaatgagctggtgaagaagaatgtgcattttcctagggtaaaaaacaagagccaagccttgctttgctcaaagaaaagcttactaaggcacttgttctagctcttcctgacttttctaaaacttttgagctaaaatgtgatgcctctggagtgggagttggagctgtattgttacaaggtgggcaccctattgcttattttantgaaaaacttcatagtgccacatgggctatacacacccttacccatggatgtgtggcttgtttacaagccaagtctagggtgatgcctcatgggctatacacacccttacccatcccatcttcacct

SEQ ID NO: 14811 - DNA, 397 bp, Glycine max
  unsure at all n locations
tgctctattcaatggagttgacaagaatatcttcagactgatcaattcttgcacagngccaaagatgcatgggagatcctgaaaatcactcatgaaggaacctccaaagtgaagatgtccagattgcaactgttggccacaaaattcgaaaatctgaagatgaaggaggaagaatgcattcatgacttccacatgaacattcttgaaattgccaatgcttgcactgccttgggagagaagatgacagatgaaaagctggtgagaaagatcctcagatccttgcctaagagagttgacatgaaagtcactgctatagaggaggcccatgacacttgcaacatgagagtagatgaactcattgtgtcccttcacacctttgagctatgactctcggata

SEQ ID NO: 14812 - DNA, 400 bp, Glycine max
ggaggtaaactagatgccttggttaacttgttaacccaactggccgtgaattaaaaattgcacctatcgccagactctatggtctatgctcctctgccgaccaccatacagacctttgcccttctgtgcaacaatctgaagcaattgaacagcctgaagcttatgctgtaaacatctacaacagacctcctcaacctcagcagcaaaatcaaccacagcagaacaattatgacctctccaacaacaggtacaatcccggatggaggaatcatcccaaccttagatggtcgaatccttcacaacagcggcagcaacaacaacagcccatatttcaaaatgttgctggcccaagcagaccatacgttccttcaccaatcccgcagcaacaacaacaacaaca

SEQ ID NO: 14813 - DNA, 377 bp, Glycine max
  unsure at all n locations
actcagctgagcagatggatgtcaaacaacccttttgcatgggaagctggatgagaccatttatatgaagcaacctactagntttgtcaaaaagggtgatgaacataaggtatgtttgctcaatccatccttatatgatcttaaacaatctcctanaatgtggtataggcgttttgatgattatatgattaaaattggattttctaggagtgtttatgactattgtgtgtactagaaatgtcacaagaatgagaaactaatttacttgttggtgtatgttggtgatatatatgctactgaccagctaaagcatgactganattgctagagttaagaaattgttgaatctagagtttgagatgaaagatcttggacat

SEQ ID NO: 14814 - DNA, 359 bp, Glycine max
  unsure at all n locations
tgctntgcattgtgttaacaaacagggcaacctcattattttgtgccactctggntcagaaaaagtgtcttccttttcttgtgggtttgctccattgtctctgttctgggaaacagaaacaaaaagaaaataacaaataaatgagaccggcacagattgtgttggttctggtttggttgctctgcattcacactcccaagttgttctgcgccaatgtagagtatgatcacagagcattggtcatcgacggcaagcgcagggtcttgatctctggctccattcattaccctcgtagtactccagaggnctctctctctctttctctcttcgngtgttctgcgtttcttttctttgaactt

SEQ ID NO: 14815 - DNA, 315 bp, Glycine max
  unsure at all n locations
gactccaactgggcgacaatagtattaaattcattaatacgatgagccacagagataccttctcccatcttgaggttgaacaaccgacgcatcaaatatactctgggggctatcgatgacttctcgtacatatttgataacgccttcattaagcctgcactcttctcgtatacaatgttgaacgcgacattcttggctaatgtcaatctgatcacgccaagagtctatcgatctagcgagttccattcttcttgcttcatgtcgtctggcttaatgcctgatgagggtngatacaacttcttttgatatagataa

SEQ ID NO: 14816 - DNA, 364 bp, Glycine max
  unsure at all n locations
tggtcataacctntcacatggaggtttctattangcgcataatatatcgagacgctcgaaattgaacaatggaagctcttgagcaattcaaatggtcataaccttactctcggagggctgattcatgcacataatatatcgagacgctcgaaattgaacaatggaagctcttgagttattcaaatggtcataacttttcactcggaggtccgattcatgcgcataagatatgaagattctcaaaattgaacaacggaagctctcgagaaattcaaatggtcataacttttcacacggaggtgagattcacgcacataatatatcgagatgctcgaaatngaacaacggaagctcttgagcaatt

SEQ ID NO: 14817 - DNA, 275 bp, Glycine max
  unsure at all n locations
tcacctggttcaagcacgactttctttctgcttttgatggcttgccttgcatagctcgcatttttcttttcaatgtgaaccttcacttgctcatgcaacttcttcacatactcagctntagcctgtgcatccttatgcttaaacatagcaatgttaggcataggcaacaaatcaagaggagtcaaaggattaaatccatacactatctcacatggtgaacaattagttgtgctatggacagcccgattataagcaaactcaacatgaggcaaaca

SEQ ID NO: 14818 - DNA, 387 bp, Glycine max
  unsure at all n locations
agactaagtttagcctagcatcctcagactgatggccaatctgaacggaccattcattcattggaggacgctttgagggcgtgtgttttatagcaaaaaggaagttgggagagttgtcttccattgatagagttcacttataataaaagttttcattctacgattggcatggctccctatgaagctntgtatggtagaaggtgtaggacacccctatgttggttagagcctggaaaagacctcaccttatgaccggaagtggtacaacaaaccaccgagaaagtcaagttaatccacgaaaggatgaagactgctcagagtaggcaganacgttttcatgataagtgaaggaaagatctggaattcgatgttggtgatcatgtattc

SEQ ID NO: 14819 - DNA, 334 bp, Glycine max
  unsure at all n locations
tgcaactggaatgttaggaagatatcacagtaatccgagattggaacattcggaagttgcacagaaagttctgagatacttaataggaacgaaagatcacatgcttacatataggaggtctgatcaccttgaggtaatngggtattcagactcaaactctgttggatgtgtggatacgagagaatccactcttggctatgtatttctctaagccagaggagcagtatcttataagagtgcaaagcaattagttgtagctgcatctaccatggaagctgagtttgtaaatggtttgatgctacactctaaactaattggtgcagaacttaattca

SEQ ID NO: 14820 - DNA, 399 bp, Glycine max
  unsure at all n locations
agctgnaatgatacactatggncacgttactccttgtaattcatatacaagtctgaacagtcacaactcttcagaaactaactatgtaatcaattacaatagttatgtaatcgattaccagtcaggaattttcaaaaataactctcaagagtcaaaactgttcaagaaagttttgaatggccatcaaaagcttataaataggtgactcgggacacgaaattccttagagtttgtctgaacaacattatcttttcctctcaaaacanaattgtcttataactctcaaaatattccttggccaaaacaattgcaaattcaataaggaatctcgatcgatcttcaaatttaatattcttctcttaaagagcgaagtcttcttattattattcttattcaaag

SEQ ID NO: 14821 - DNA, 252 bp, Glycine max
  unsure at all n locations
ctatgatgagacctatgtccctgttgctaggttggaagctattagatntttcttgcttttgcttgtataatgaatttttggttatatcaaacggatgtgaaaagtggatacattgaagaagagatatatgtgggagaaacctccaggttttgtagactttaatcatcctaatcatgtacacaagttggaaaagacactatatcgattaaaacaagaacctagatcttggtacgaaagattgagcaatttttt

SEQ ID NO: 14822 - DNA, 382 bp, Glycine max
tcttagtttcagatgatgcagatgggtttgagctacctcatcactcctctaatgactatggcatcatttctggcgctaaactgctgggagttggaggccatcttctcaattaaatttctggcttcagcaagagtcatgtctccaagggctccaccactggcagcatctatcatacttctctccatattactgagtccttcataaaaatattggagaagaagctgttctgaaatctgatggtgggggcaactggcacatagtttcttaaatctctcccagtactcatacaggctctctccactgagttgtctaatacctgagatatccttcctgatggctgtggtcctggaagcacggaaaaaattttctaagaatactctct

SEQ ID NO: 14823 - DNA, 292 bp, Glycine max
  unsure at all n locations
ctatgatgagacctatgtccctgttgctatggtggaagctattagatttttcttgcttttgcttgtataatgaatttttggttatatcacacggatgtgaaaagtggatacattgaagaagagatatatgtgggagaaacctccangctttgtagactctaatcatcctaatcatgttcacaagttggaaaagacactatatcgattaaaacaagaacctagatcttggttcgaaagattgagcaattttttagttgggcaatcttttgtatgagatcaagttgacaaaaca

SEQ ID NO: 14824 - DNA, 401 bp, Glycine max
  unsure at all n locations
actggatgatctntattgcttccttcttcttttcctttataatcttcgccatgaatgagcatttgttctaaagattctataatatcatctaaaatatcctttcttggataaataacattagactcatcaaaggaaacatgaattgattcttcaattggcattgttctcttattataatttctataagctctactatgcaaagaataaccaaggaaaattccttcatctgacttagcatcaaattctcctaagttttcttttccattgtttaatacaaaacacttgcaaccaaagacatgaagatgtgagatgtttggtttcctaccattgaacaggtcatatggagttttctttaagatgggtcttattaaagccctattcatgatataacatgcagtatt

SEQ ID NO: 14825 - DNA, 390 bp, Glycine max
  unsure at all n locations
agcttccttaagaagattcctaaagaagctatagcttagctacttatacctctctaatagctaagctcacctccttgagatgagaagctagagcttagctacacaccccctataatagctaagctcacccccatgacaaaaaacatgaaaataataaaaaaaaagtccttattacaaagacaactcanaatgccccgaaatacaaggctaaaaccctatactactagaatggccaaaatacaaggcctagacgaaggaaaaacctattctaatatttacaaagataagcgggctcatacttagcccatgggctcgaaatctaccctaaggctcatgagaaccctagggcctttccttggatctctagcccaatctacttggagtcttcta

SEQ ID NO: 14826 - DNA, 397 bp, Glycine max
  unsure at all n locations
agcttccataacaaanaatatctcctagtatttactaaatttgatctgcttgaggagaagattgaacacattcctctagcacaatgtgaatggtttagcgacttccaaccatttatcagtcccaatcagaagagaggctgtagcaatggcaataataactcttcattagcacaatgtgcttttcaatacattgctgtcaagtttaagagattgttcctttccatcactggccgaattctctttgtttcactggttaatggattggaacctgatactattgatgaagctctcagatatggaagggaggttatggagtgggaaaaatgggatccctctattgtaactgatccaaagtccgagaatacttcaacaagcattgatgagcaaagttacttat

SEQ ID NO: 14827 - DNA, 366 bp, Glycine max
agtcttgcacgtatcagtcaagtgtatggactatatcgtagccaaagtgctcatcgataatggttccagtttaaacgtgatgcctaagagcactttggagaaattaccattcaatgcctcccacttaaagccgagttcaatggtggttcgtgccttcgacggtacccgccgagaggttaggggagagatcgatctcccagtacagataggccctcacacctgtctagttactttccaaataatggatattaaccctccctacagctgtctgttggggcgcccgtggatccactcagtaggagttgttccctcaacactccaccaaaagttgaaattcgtagtggaagggcatctggtcatcgtatc

SEQ ID NO: 14828 - DNA, 465 bp, Glycine max
tgcggcatgcaagcttcatggtatggcctgtatcctatagttatggagttcttaaggccaacgttgcatattctatatttgtaagtctttgcaggcttcatggtgaagagtggttcgtcttttccatcacctttagctgttttgccattgataaggacaccttcatgcctaccaagagagcgcccgctatccaataacttcctcagaatggtgtgactctttgtgtaccagtcaccaatgagaacggtgtattcatcctcaggatctgggtaaggcacacgaataatcatgcgactgtttacacgaaggccaccaaaaccaccagctgccctatgcatggctgtgctcgggtagaataaagaactgcctatttggtcctcacctgatacgaacgtgaagttgtcctggcgaatgggcagtatttctgcacccctcttgcatgaattcttttgtgtggatgccttc

SEQ ID NO: 14829 - DNA, 296 bp, Glycine max
  unsure at all n locations
tttgttaaaacataagcacttatacaatgaatgaaagctggagttgctgcacatgatgtccaacgttatgtcaaggaatcagattgggctgcacaatgcacaaggcaaagataaaatgtcaaatgaagatttgaagctgcaggatccacgatgtcggacacgatgtcctgacatccggcccgaaaatactggacacataaatctgttatatctttaacagattaatgtgcagttagcaacagaattggcgatctatctttaggaacgaattanaagataattaaagtttgaattac

SEQ ID NO: 14830 - DNA, 467 bp, Glycine max
  unsure at all n locations
ttggcaatgtactcaacgaagtacttgtgtgcctctaaaataaaaggattaaaaatatatcagttacataggcagttggatctgtaagagcttgataagctttggcaatgtactcaacgaagtacttgtgtgcctctaaaataaaaggaataaaaatatatcagttagcagttacatatgcgattgtaggaatccaacattcctgcaaacatcaaagttggcattgcaacaataaaaaaaaataaacaactgaaacaccttcaacctggatctgggtttttatctggatggtattgaatagaaagtcgcctatactttttctttatttcagactctgccgctccaggctctaatcctagaatattaaacggatcanaaatttcaatctgcatcaaaattaaaagaaaaatttcagaacgtgcaccagtggaagtctcagccaattagtaaaatgttaaacacaaata

SEQ ID NO: 14831 - DNA, 336 bp, Glycine max
  unsure at all n locations
cttcacaaatcgtctataaaaacttgcttagccatgaaaactcctcacctcggtcacagacttaggtgtaggccattcttgaatagccctaaccttcttctcatcaacttgcactccttttgaactcacaacaaaaccaagaaacacaacatggttagtacaaaagatgcatttttcaagaatggcatacaattgttcttttctaagcacagtcaagacagaatttaaatgatcaatatgcaaatcaagtgaagtgctatagataagaatatcatcaaagtacaccacaacanactttcctatgaactctctcaagatatgggtcattaatctcat

SEQ ID NO: 14832 - DNA, 444 bp, Glycine max
  unsure at all n locations
catgcaagcttctgttatgaatntcgagtgtctcgatatactacgggactttatcggacatccgagtaaaaagttattgacatttgaatttgctcatagcattcgttgtcaattacgagcgtctagatatattaaaggattcattcggacatccgagtaaaaagttattatctttttatttcgctcagagcttctgttttcaatttcgagcatctcgatatattacaggactcaatcggatatccgagtcaaaagttattgtcgtttggatttgctacgagcttccggtttcaattacgagcgtctcaatatgctacgggacacaatcggacatccgagtaaaaagttattgtcgtgtgaatttactcagagcttccgtcgtcaattacgagcgtctcgatatattacagggattacttggacatccgagtaaaaagtcattgt

SEQ ID NO: 14833 - DNA, 326 bp, Glycine max
  unsure at all n locations
nngcttatatgattggctaatattttgttaatacataagcactnagacaatgaaggaaagctggagttgctgcacatgatgtccaacgttatgtcaaggaatcagatcgggctgcacaatgcacaaggcaagataaaatgtcaaatgaagaattgaagctgcaggatccacgatgtcggatacaatgtccaggacatcctgcccgaaaatgcacaaggcatgataaaagaattgaagctgcaggatccacgatgtctgatactatgtccatgacatcttgcccgaaaatactggacacataaatctgttatatctttaacagaata

SEQ ID NO: 14834 - DNA, 434 bp, Glycine max
  unsure at all n locations
agcttaaatccttaactgcacaggctctattatttgaagagtatccttgtggaaccttcacccaacgaagacactgacaaaaacatatcttctccttcttggacaaagtatggcaggctgggggcaagtaaattttcttcccatcaaaccttggatgcaactgtgatcgtatacccatatcaactagatcttgacgggtattcaagccatccttcgtcttgccttgaatgttaaggagcgtcccaatcaaactgtcacaaacacttttctccacatgcataacatcaatacaatgtctaacttcaagatcacaccagtacggaagatcaaagagnatggacctcttcttccatatgcaactatgactattatccatcttttaggtcttcccacatacaatattcaggtgttgaacccgctgatatacctgctca

SEQ ID NO: 14835 - DNA, 329 bp, Glycine max
  unsure at all n locations
aagatgtgctgaattctctagagactgtcttcttagaaataaaaaggcaatcgatctctatatgtttggcacgctcatgaaaaattgngtagatgtaatatgaggagctgcgtgattaacacaaattagtctcagttccaacctcacacatttagctcttcagcgattagtctaattgntttatacattatttgacaagttgtgagagtcatagcttgaatttctgcttcagctttggaccttgcaaccacattntgattcattttttttcctttccatgaaatgagaatccctcaanatagaacacaatatccaaaggtggatctcct

SEQ ID NO: 14836 - DNA, 300 bp, Glycine max
  unsure at all n locations
ttcgagcgtctcgatatattacgggactctatcggactttcgagtggaaagttattgtcgttagaatttgttgcgagcctcggttttaaaatttgagcgtctcgatatattacgggactcaatcggacatccgagtaaaacgttattgtcgttcgaatttgcaacgagcctctgtttcaattntgagcatctcgatatgttattggactcaatcagacttccgaatgaaaagttgttgtcgttcgtatttgctacgagcttcggtttcaatttcgagcgtttgacgggactcaatcggac

SEQ ID NO: 14837 - DNA, 393 bp, Glycine max
  unsure at all n locations
caatagacctccaatctttaatggagagggttaccactactggaaaacccgaatgcaaatttttattgaggcaatagatctaaatatttgggaagccatagaaatagggccttatatacccaccacagtagaaagagtttcaatagatggtagttcatcaagtgaaagcatcactatagaaaaacctatagatagatggtctgaagaggatagaaaacgagtacaatacaacttataagccaaaaacataataacatctgccctgtgaatggatgaatatctcanggtttcacattgtaagagtgctaaggaaatatgggacactcttagattaacacatgaaggaactacggatgttataagatctatgatacatgcactaactcatgagta

SEQ ID NO: 14838 - DNA, 389 bp, Glycine max
  unsure at all n locations
agcttgaatngngtaccattatcggtgacaatggcataagcaagaccgtatctgcatatgaactntctcacagtggccttgcttcaatccacttggtgaaatagtcaatggagaccaaaaagaacgtaacttgtcttgtgcttttggtgacggccctagtatgtccatcccctacatggcanaaggccaaggggaactaaagttatggaagttgtcgggtggtgttcatggaacttctggcatcgtaaataccttcttgttaagttaagggcgcctaccttaagtgtcggccaatagtagccatcatgcactanctttttttccagggagcgccccctcgtgtggaggccaaagaatccttcatgtaactctcccatgacataatctac

SEQ ID NO: 14839 - DNA, 310 bp, Glycine max
atcctcttagtcacctgccgcatgcaagcttggcactcggatgctgcgatggatagtgggagtgatgctcttgcgaacattagatcgaaagtatatctgtctcccaagctttggtatttgagggttaatgtgataaaggcacaggaccatatgccaactgataagggtagataccctgaggtatttgtgaaggctattctggggaatcaggcctcgacgactagaatctctcaagtatgagtattaatccaatgtggaatgaggatttgatgtttgtggtggcagaacagtttaggagccgctgattttg

SEQ ID NO: 14840 - DNA, 319 bp, Glycine max
agagaaggagaatggattaaagcctccattccactatctacgcgcgatgagtatttctccctccaaagacattaatttgcaaatctcaacggtgaaaacatgtgaaagtggcattcaaatcctgtgtcccaatttcatgaagatccaacggttaacagaacctggattgtagttttactaagatagttttgggtttctgcgggaagagaaaaagttacaatgcgaagggtatttctctcagcttcgacattgtttcgcaattttcaacggtgagaattcttggaaataagtttcaaacctggggctgaaatatcatgac

SEQ ID NO: 14841 - DNA, 351 bp, Glycine max
  unsure at all n locations
aattttgtgcctcacatgaagtctgaactttgaagtgtaattctcaaatgatcaaagttgataaaatccacacacatagcctctatttatagcataagtgtcacacaaaattagagggaaatttgaatttctattcagatttcacttgaatttgtggagtcaaaatttcactaattatgattagtgaattntagcaatggttcagtccactaatccaagatcaagtgcaagatttctccactaagtgtgcttaggtgtcatgaggcacgtaaaacatgaaagacatgcacaaagtgtggctatatgatgtggcaatggagtgtagcaagaaaatgttcacattcccctcta

SEQ ID NO: 14842 - DNA, 444 bp, Glycine max
  unsure at all n locations
agctntactatacagagaatatccaaggaatttaccttcatctgacttagcatcaaattttcctaagttatcttttccattattcaatacaaaacatttacaaccaaagatatgaagatgtgagatgtttggttntctgccattgaacaatccatatggagttttcttcaaaatgggtcttattaaagccctatataaaatgtagcatgcaatgttaacggcttcagcccaaaagtattttggaagaggagtatcatttaataaagttctagcaatctcttccaaagatctatttttcctttcaacaacaccattttgttgaggggttcttggtgcagaaaaattatgctcaatcccatgcttatcacaaaataattcanattctttattntcaaactcacccncatgatcactcctaatagatataatcttgagattttctta

SEQ ID NO: 14843 - DNA, 454 bp, Glycine max
  unsure at all n locations
agcttatcatacatcaaacttggagaaagagttctttgggtcaagacatgagaagcaatcaagtataatgttacttccttcactaaagcggtgatccatctccacacatattttatcaatagcaacataaaaaatctttgcacggtaatgatgaagattagtgatagtcctcccttctgctcttgaacgatcccgaaccggtatttcgtcattcatatttggtaccggaatacttttagctacacaaaatccttggacatcggcaaaaaaattattccagccactctctctcattgtgcccaaccgagctttgacaacatcaactaattccatggcattcacaatattaagatcttttctttgcaatacaattgagagctcgtgtgtgatacccaaccacttttacattaacctcanaatataagcacatttagagctctccattntttctatc

SEQ ID NO: 14844 - DNA, 350 bp, Glycine max
  unsure at all n locations
tcacaaatctggacctgtcgcaagtgtttgtggtttgtgctcctctgctgaccaccatacagacctttgcccttccatgcagcaacctggagcaattgagcagcctgaagcttatgctgcaaatatttacaatagacctcctcaacctcagcagcanaatcaaccacagtagagcaattatgacctttccagcaacagatacaaccctggatggaggaatcaccctaacctcagatggtccagccctcagcaacaacaacagcagcctgctgcttccttccaaaatgctgctggcccaagcagaccatacattcctccaccaatccaacaacagcaacaaccccagaaac

SEQ ID NO: 14845 - DNA, 297 bp, Glycine max
atgcaacaattgttagccgtggctatacgagacatcttgccaaacaaagtcaggttcacgataactcgcctgtgctttttcttccatgctatatgtagcaaagagactgatccagtaatgttagatgagtgggaaaatgaggccacaattatactgtgccagttggagatgtattttccccctgctttctttgacatcatgattcatttgattgtgcatctggtcagaaaaatcaaatgttgaggtcctgtttatctaccgtggatgtacccggttgagcgatacatgaagatctta

SEQ ID NO: 14846 - DNA, 308 bp, Glycine max
taccaacatcagacaccatggattatattttgtgagaacgaaaaaaggggtggagggagactgacacatagagaccgatgctttgagccggaaatgaagtctgagcttggacctgtaattctcaaatgatccatgttgattgattactggcacatagcctttctttataacataagcgtcacacaaaaatacagggagaggagaatatctattcaaactgcacatgattctgtggtgtgaacatttcgctttttatgaataaagaattataaccatggttcaatccactaaaacaagaccaagtgcca

SEQ ID NO: 14847 - DNA, 322 bp, Glycine max
  unsure at all n locations
cttaaggttgagaaatgagtttttgttagggagaaaacaggacacaaaatttatgcctcaaatgaggtctgaactttgaagtgtaatttcaaaaatgattaaagttgaaaaaaatgcatacccaaggcctctatttatagcctaagtgtcacacaaaattgaagggaaatttgaaattttggctccacaaattcaaattcaaattcaaaatnncagtgaaatttgaataaaaattcaaatttcactaattatgattagtgaattttagctatggttcagcccactaatccaagatcaagtccaagattctccacttgtgctt

SEQ ID NO: 14848 - DNA, 261 bp, Glycine max
tgctacaggttctagggaacattacactgcgatgggctataaaatccgcatacattgtgagcagcattctgaaagatgcttctgtgcctgatgctgagaaagatgtttcaacatattccaccccaagtgataccgtgcctgatgctgagaaagatgttccaacatcctgcgctccgaatgctgaagccctcccttcacccagtgaagaggaatcttcagaagaagaggatcaagccttataggagactcctgctccacggg

SEQ ID NO: 14849 - DNA, 331 bp, Glycine max
  unsure at all n locations
tatgaccatatgaattggnccttatctttcattgttcaatttcgagcgtctcgatatattatgcgcctgaatcggacctccgagtgaaaagttatgaccatataaattgctcaagagggtctattgttcaatttcgagcgtctcgatatattatgcgccttaatcggacctccgagttaaaagttatgaccattggaattgctcaagaacttccattattaaatttcgagcgtctcgatatattatgcgcctaaatcggacctccgagttaaaagttatgaccatatgaattgctcaagagctttcattgttcaatttcgagcgtctcgat

SEQ ID NO: 14850 - DNA, 337 bp, Glycine max
tgcttctacactaagaagcactctttattgagtgaatcaccaaagagagaacaaccaccaaaattgaggaccgttttgtaattttgtaatttacaatttacttaccttcatttctttcaagttttgtaacaaaaaggcctttcattggaagtgtgttgggagcctccaataagttaccaaacttccatttgtgtgtaataattttaggcaatttttccttaggatagtgagtgttttgttgggaaccttgaatgtggtcatccaaacactcttaggatttgcctagtttacatttcttgcttactttcatagcttatttcctttaccttccctttta

SEQ ID NO: 14851 - DNA, 331 bp, Glycine max
tgaatatgattatatgatggatgattatgttgagaatgagaggtgaccaggaagatagctaagggaattgaagtggcacacatgcttaggccttgggaaagagatagttcattgtttcaccaatatctgttggtttttttcttcatacttgtctttacattttcttccatttttaccatagtaatagaagcagtgtgatgtagctccattggagcctgtaggccttggatcttcttcatcaatggagtcctttgcttcttgaagtttgatggcagcggaaaggagaaggagaaatatgattggagacgccactttcaggagaaaaacagtc

SEQ ID NO: 14852 - DNA, 325 bp, Glycine max
ttacttcaatattttccaaatcatttataatcttgttgaaatcagccaattgttcagtggcagttcttgactctgtcatcttgaagatgtacagttgttgcttcaagcatagccgatttgcaaggaactttgtcatatacaatgactccagtttcaaccacattgaggttgttgtcctttctcttgcaacttctcttaaagctttatctccaaggcatagaatgattgcacttctggctttagcaatcatctctaatttcttctttgagcttaaagattctgacatcctttcttccccttcaagagcttctacacagccatggtg

SEQ ID NO: 14853 - DNA, 338 bp, Glycine max
tccattgttcaatttcgagtgtctttttatattatgcgcctgaatcggacctccgaatgaaaagttatgaccatttgaatttctcgagagctacctttgttcaatttcgtgcgtctcgatatattatgcgcctgaatcggacctccgagtgaaaagttatgaccatttgaatttctcgagagcttccgatgttcaatttcgagcgtcttgatatattatgcgactgaatctgacctccgggtgaaaagttatgaccattttaatttctcaagagcttccgttgttcaattttgagcgtctctatctgtgatgcgcctaaatcagacatccgagttaaa

SEQ ID NO: 14854 - DNA, 336 bp, Glycine max
tagctacacatacctctctaatagctaagctcacctccttgagatgagaagctagagcttagctacacaccccctataatagctaagctcacccccatgaggaaaaacatgaaaataacaaaaaaagtccttattacaaagacaactcaaaatgccccaaaatacaaggctaaaaccctatactactataatggccaaaatacaaggcctagacgaaggaaaaacctattctaatatttacaaagataagcgggctcatacttagcccatgggctcgaaatctaccctaaggctcatgagaaccctagggcctttccttggatctctagcccaatc

SEQ ID NO: 14855 - DNA, 340 bp, Glycine max
ttgggagaatcaaatattattgggttgtattaatacatatggatcatctatgagaaaaattaggaccaaggacataaaagatataacttgttatgatgatgtatatatacgtgagatacatggttacttgggttgcttaatgtgcaatacatacaaaactttcacacatatttctaatttaaataaatccaataaattttccaaactaattatttgtagatccgttttagttattttaaattagtataaaaatatataatgttgcaacgagttgcaaacacaaatattaagactatagaccaaaatagaagctaacaaaatcaaatactaatttatttat

SEQ ID NO: 14856 - DNA, 324 bp, Glycine max
tcaacattcaatttcgagggtttctatatattacgggattcaatcagacatccgagtaaaaagttattggcgtttgaatttgctcagagcttcggcattcaagtcggagcctctcgatatactacgggactcaatcagaccaccgagtaaaaagttattgtcgtttgaatttgctcagagcttcggcattcaagtccaatcgtctcgatatattacgggactcaatcagacatccgagtaaaaagttattgtcgtttgaatttgctcagagcttccaaaatctatttcgagcgtttcgatatattacgggactgaatcagacat

SEQ ID NO: 14857 - DNA, 486 bp, Glycine max
  unsure at all n locations
gtgaaagaattagtatgggcagaaatgtctccgcattgattggtaaatttgttcctcaaattcctgaaaaatgtaaagatccaggtacattcagcataccttgtattatagggaacaataagttttacaatgccatgctagatttaggagcttctgttagtgttatgcctctgcctatttttaactctctatctctaggtcctttgcaatcaactgatgtggtaattcatttagctaatagaagtgttgcctatcctgctggtttcatagaggatgtcttagttagagttggtgagctcattttccctgttgattnttatattttaaatatggaggagggattttctaaaggatcagttcttatcattctaggcagaccttttatganaactgctagaactaagatagatgtatatgtacgcacactatctantggagttggtgatataactattcattntaatattcttgatgctataaacacca

SEQ ID NO: 14858 - DNA, 486 bp, Glycine max
  unsure at all n locations
ntgagaagcatgtgatccttnggcatcatcaaaacattcagcttgatcctttgtctacaaaatcgacgttaacatataaatgttaacatcaatttttgaaaaaactgatgttatccaagtgatattaacatcggttttcgaaaaaccaatgttaacattgtctcgttaacattggtttttcaaaatcagatgttaatatcttcatgtttattacaattatgccccacccttttctaacatctatttaatcaaaaaccaatgttaaatatctttttttctagaagtatgttttgatgaatagatatctgcctcaattaatataggatcccaataaataagaccatgataacactgagaaggtatcatacttttatttgaattaattatctacgaaggagatgaatcaagaagatattgttgatttcatgttgcgcatggatattcaagactaaaggccaattctagctctatcataatatatatctc

SEQ ID NO: 14859 - DNA, 483 bp, Glycine max
  unsure at all n locations
tactcagctatcgaatatatataagagaactatgactatcgaagaatctattcttgtttcttggatgagtctaatgctattgctgcaagagaggatattctatatgatatcgcagaatctttataacaaatgcatatttatggaaaagattataaagganaagggaaaggaagcaatgaagatcctccaaaagaagccaaatcaaataatgaacttccaacagaatggaaagcttcgagagatcatccncttgagaacattattggtgatatctcacaaggggtaacaactagacattctcttaaagatatatgcaataatatggcttttgtgtctatgattgaacctaanaatctaaatgaagccataatagatgatcattggatagttgctatgcaaaanaaactaaatcagtttgagagaaacaatgtgtgggaactagtagagaaacctgaagactaccccatcatatgaacacaatgg

SEQ ID NO: 14860 - DNA, 433 bp, Glycine max
atatagatgtcttcctctaaatccccatgcaagaatgcagttttaacatctaactactccaagtgaagattctctacagctactatgctcagaataactctgatggtagtcatctttacaactggagagaagatctctgtgaaatcaattcctttgttctgctgaaaccctttcaccacaagtctcgccttgtatcttcttctacctttagattcttcctttagcctatagacccacctattctgtaacgccttctttccttctggcaatttagttaaagaccacgtcttattcttctgaagggatgccatctcatctttcatcgctagctcccactcaatagtgtcattcccctgtgtagcctcattgaaacattctggctcaccagcatcagttaacaacaaataatgcaatgaaggggaatacctatctg

SEQ ID NO: 14861 - DNA, 298 bp, Glycine max
ctcgagagcttccgttgttcaatttttagcgtgtagatgagttatgtccccgaatcggacatctgtgtgaaaagttatgaccacttcaatgtctcgagagcttccgctgatcaatttcgagcgtctcgatgtattatgaccccgaatgggacatccgcgtgaaaacgtatgaccattcaaatttctcgagagccttcggtgatcaatttcgagacgcctgacgaattatgtgcccgcatcgaacgttcgagtgaggacttacgaccaagagaatttctcgagagcttccgctgttcga

SEQ ID NO: 14862 - DNA, 396 bp, Glycine max
  unsure at all n locations
tgtnatcgattacacacatactgtaatcgattaccagatgagtttttcaaanaacattctcaacagtcacatctttntatctgattcttaagtggccatcaaaggcttatatatatgtgactagagacacgaatttaacaagagtttttaagaacaaaaaggtcttatcctcttaaaaagcaaaatcattttaccctcttacaaattccttggccaaaactcttgtgattcaataaggaattatttgagtgctcaaattgttcaatctatctctttcaagagagagttcttcttttcttcttcttcattctgaaaagggattaagagaccgagggtctcttgttgtgaaagaattctaaacacaaaggaagggttgtccttgtgtgtttagaactt

SEQ ID NO: 14863 - DNA, 380 bp, Glycine max
  unsure at all n locations
agtgtccatattatctcttagtttatgtcatgaanatattataaaactacaaagcacatttaaataataacagcttccaaagttaccagatatcatcatatctatgatatgatgatccaataacaagcaaaactgaaaggtagtttcaattgggtataagttgcataaaaaaatttaaaaacactaagactactcaatacttgactggagcaaggatatcaagttgggaaccgagcttgtcttcagcaaccttctcggctttcacccttaatttgttgagctgcttctttctctcataaaccaattgtgtcttttcctttctcttcttttctagctcctatgagcaataaaacaattactcacatcagcaaacacatcta

SEQ ID NO: 14864 - DNA, 360 bp, Glycine max
  unsure at all n locations
tctaaactntatacaagaatgaagctctgataccacttgttagacaagtggcctcaaatatcttaagaagggggggttgaattaagatattccaaactacttccccaattaaaaatctatttcactttcttttcaagttataaattcccttaacaatgaacttcttaaatattaattcaaataaaaacaatttgaatatgaatataaagaaataataaacaaaggagtttaagggaagagaaagtgcaaactcagatttatactggttcggccacacccttgtgcctacgtccagtccctaagcaacccgcttgagagttccactatcttgtaaattccctttacaagttctaaacacat

SEQ ID NO: 14865 - DNA, 441 bp, Glycine max
  unsure at all n locations
aagcttataaaanaactataataagtcacaagttacttggatcatgaattgtttgtgttaaataaattcatatttaattaaatttatctagttattattaaatatattctatgtagcatttcttttacatgccataagtatcctttgagtatttaagagaaatgcatactcaagatgctactattaattaagataaaaaaaaatagaaagaataatttagaatttaagataaatatcacaagtgtcccatgagtattatcctatattcaagatactataattattaatgtttccattatcaataatattgacatcacatatatatatatatatatatatatatatgaggtgctgtattattatcactatcattaatatatatcactattattgctactatcaatagtactactatatcattgatcacgctcacatcacccc

SEQ ID NO: 14866 - DNA, 460 bp, Glycine max
  unsure at all n locations
tctgtcatcttcttctctggaccaatttgaagccatctctggatctgttcaacacacctaggcactacatgtatgtagaatatggactcttctgcttcattaaaagccttctcaattgcaacttcagaaaaatcaatggaaagacaattagggtcatttccaagaactatagaacatatgttatcgtaggagaagcgattgaagacatcttgaagatccacaactcttccctgttgctgtacatgatccaatattggaaggagaccattatgcaccttgacgtgaatggttttcactaaaaacacctcgaagcttttctgcttaaagagagaatggaagagaatccctgtgtacttccatgcttcataatcagcggagaaaataccgtctccgaacgcctganaaatgtgacgaaactcgggtcccttgacgtagttgaggaaattcttgctcagcatgt

SEQ ID NO: 14867 - DNA, 358 bp, Glycine max
  unsure at all n locations
tagtatccatcttgggcctttttcccacaactctttgtaatgggagagaaattttcatctaaagcatacaagtccctaatgttatcaaatcctaaaatttgagctccttgggagcaaaacaatgtgtgtctcctagagagagcatcaactaccacatttgtttttccctttttgtatttgataacatantggaaatgctctangtactctacccattttgcatgccttttgtttaactcgctttgccctctaatgaacttaagtgattgatgatcactatgaatgacaaattccttggaaacaaggtaatgttcccaagttcggagtgctcttattaatgcataaagctctttatcat

SEQ ID NO: 14868 - DNA, 456 bp, Glycine max
  unsure at all n locations
gtcatacctcacacaatatatgtatgtgtgtttatgtagcaagataccttatatatgcatgcatgtagcaaaaagatatctcacaaaatatatatatgtatgtttaggtagcaagataccttggatatgcatttatgtaacaaaaaaatacttcacaaaatatatatgtatgcttaggtagaaagataccttagatatgcatgtgtgtatcanaaaaatacttcacaaaacatatatatgtatgtttaggtacaaagataccttggatgtgcatgtatatagcgaagatatctcacaaaatatatatatgtatgtttaggtagcaagataccttggatatgcatgtatatagcaaaaatacctcacaaaacatatatatgtatgtttatgtagcaagaatacgtggatatgcatgtatatagcanatatacctcacaaaaatatacacatggtacg

SEQ ID NO: 14869 - DNA, 299 bp, Glycine max
  unsure at all n locations
actcgagactaaagagaggaattatcctacccatgatctggaggctgctgtagttnttgcccttaagatgtggaggcattacttgtttggctccaagtttgagttatttagtgaccataagatccttaagtacttgtttagtcagaaagagctgaacatgcgttaaaggagatggttagagtttcttanagattatgattntaagcttagctaccatcccggcaaagccaatgtagtggctgatgccttgagttggaaatccctacatatatctgccttgatggttagagagatggatc

SEQ ID NO: 14870 - DNA, 405 bp, Glycine max
agcttagctacacatacctttataatagcttagcacacctccttgagatgagaagctagaacttatctacacaccccctataatagctaagctcacccccatgacaaaaaacatgaaaataaccaataaaagtccttattacaaagacaactcaacatgccccgaaatacaagggctaaaccctatactactagaatggccaaaatacaaggcctagacgaaggaataacctattctaatatttacaaagataagcgggctcatacttagcccatgggctcgaaatctaccctaaggctcatgagaaccctatggcctttccttggatctctagcccaatctacttggagtcttgtagccaatgcccttgcggggtaggattgcatcattacttttcactcagat

SEQ ID NO: 14871 - DNA, 414 bp, Glycine max
  unsure at all n locations
ctcagcttgacattcaacttcgagcgtctcgttatattatacgactcaattatacatccgagtaaaaagttattgtcgttcgaatttgctcagagcttcaacattcaatttcgagcgtctcgatatatgacgggactcaatcagacatccgagtaaaacgatattatcgtcttaattggctcagagcttctacattcaattttgagcgtctcgatatgttacgggactcaatcacgcatccgagtaanaagatactgtcggttgaattggctgagagctncaacattcaatgtcgagcgtctcgatatgttaccggactcaatcagacatccgagtgaaaaggtattgtcgtgtgagttggctcatagcttcaacattcaatttcgagcgtctcgatatatgacgggactcaat

SEQ ID NO: 14872 - DNA, 445 bp, Glycine max
  unsure at all n locations
agcttataatatatcgatacgctcgatattatatgtcgaanactcttgacaaattcaaatggccataacgtttcacacggatgttcgattcgggcgcataatatgtcgagaggctcaaaattgaacaacggaagctcttgagaaattcaaatggtcataacttttcacacggatgttcgattaacgcgcatcacatatagagacactcgatattgaacaacggaagatcttacgaaattaaaatggtcataacttttcacactgatgtccgattcaggcttataatatatcgatacgctcgaaattaaacatcggaagctctcgagaaattcaaatggtcataacttttcacacggatgtccgattcgagcgcataatatgtcgagaggctcgaaattgaacaacggaagctctngagaaattcanatggtcataacttttcaca

SEQ ID NO: 14873 - DNA, 409 bp, Glycine max
  unsure at all n locations
cacattcacaatactcatttttggtgtgtgagtttctggagatgggcgacgtcaagaagattttgaaggatgatgaacaagcaattgcgtttgattggaataaaagggtggatgttgttaagggtgtaacaaatgctttatgctatatgcatcatgattgctcacctccaatcgttcatcgtgatatatcaagcaagaatgttcttttggattccgattatgtagctcatgtctcagacttcggaacagccaagtttcttaatccagattcatccaattggacctcctttgcaggaacctctggatatgctgctccaggntaatttcctttctctatactatttgagtaaatcatgatattntagtttgtcttcggtagccatttacanatatatatacatcacaatta

SEQ ID NO: 14874 - DNA, 375 bp, Glycine max
  unsure at all n locations
taaacacaatctctgtatgggctaaagcaatcccccaagccatggaacaagagatttgatgacattatggctcacataccggttcatagaagtcactatgaatacttgtgttacttcaaattttcttctaaatctgagtttgtgatattgctattatatgccgatgatataaattacatggaagggtatccatatgatatatgctganggccactgatgtatgctatggtatgtactcgccctgacatagctcatgcactgagcttagtaagtaggtctatgggaaaatcaggcaaatgacattggcaagcccctgaatggatactcagatatatcagaggatcacttggaagagctattgtctatgctttagct

SEQ ID NO: 14875 - DNA, 369 bp, Glycine max
  unsure at all n locations
gtttgtcatttcaatttctcactatttaaaatggatcattttcaaggtccaacgccttataatgatcacctcttaaggtaaaaaagaatcacttgataagcaagaactacgtaggtctgatttcctcatcgcaattgtggatacgtaggagcaaaagccctgcttttgtcgaccaccccaagagatcgttaatggtccaatgccttaatgtttctctcctctcanaaaaacaagagatcgttaatggtccaagctcatgcttttataaaaaggttcatcacgtcaagttgaaatatgaaagtnaccgtcttgcaaaattggcgcataagatgaatcgagtcacatcactgcttcgtctactggcaaaca

SEQ ID NO: 14876 - DNA, 463 bp, Glycine max
  unsure at all n locations
agaataaaacaatccanaatcaattgtacctttcaagtaacgaagaaattcttttgcggcttttagatgaggagaggtaggagcctccataaagcgacacacaactcccaccgcatatagaatatcgggccttgtattggttagataccttaaactccccacaagactcttgaagatcgtgaagtctaccttctctccttcatcaaactttgataacttcaagccaccttccataggtgtgttcacgggattgcaatcaagcatattaaattacttcaacacttcttttgtgtacctttcttgtgagacaaagataccattctccgtttgcttcacttccattcccaagtaatatgacatgagtcccatatctgtcatatcagattcacgagacatggactccttgaagtcttcanacaaatttgggttattggccggaaagataatgcatccacataaagac

SEQ ID NO: 14877 - DNA, 291 bp, Glycine max
atgcaatactagactcagaatatgcaacaaacactatacctaaatcagtgtcacagaaactggaagaaaatactttatacaagcacaaacttcaagccttattccatgtattgtggggaagctatgactggccatatgggttgaggtgttatagaggagcacgcatggcggaagggaccttggactgctgaataggacaggtggcttgtagagtatgtcaggttgcatggagaacgcagacggaactctgtcgctatgctcgcaatatataaacacgcacactttttcact

SEQ ID NO: 14878 - DNA, 372 bp, Glycine max
  unsure at all n locations
tccaagagttgaagaggcggttgacaacagctccattgttatatttttccgaccctaagagaccatntgaagtgtattgcgatgcgagcgggcaacgcttggggtgtgtgttaatgtangagggaagagtagtggcttatgcttcacgccaattgcatcctcatgaagttaactatccgacccatgacttggaactagcagcggtggtctttgctttaaagatttggagaggcactattaatttggtactcgttttgaagttttcagcgatcacaagagcctcaaatacttgttcgaccagaaggaactcaatatgaggcaacaaagatggatgaagttcctcaaggattatgattntggtctttcctacca

SEQ ID NO: 14879 - DNA, 426 bp, Glycine max
agctgggtgggagatatagcatcttgctgttgttagtttttcaaaaatcgatgttctagtaaaactgcagctgttggccgctctgctggatttgttttaaagcagcacctcaagaaatctttaccctcagatgaaagtgtttcatgtataggaggggtctccttcataaccttaaacagagctgcagcctgcataattagagaagatgtttatttagcaagataaaaaaaaaggacccgtatacagatagcatctctgcctaatccacaagttgcaaacagaaaaaagttggctaacagatgccttagctggttgtaaattgatggttgccaaaataagttaaaagctgacacattatcctacattaccaaacgttagaatctcatattctcatagaagcagatataaaccatgtctaataagaat

SEQ ID NO: 14880 - DNA, 380 bp, Glycine max
  unsure at all n locations
ctactataatngngaacatctctttctctgtcattggaggtgccacttgagcttgcagatcccttcaactctgggcatattccttgaaggaatcatgccctttttttgcaccgtgtctataagtgcattctatccgaagccatatccaaattgtactgatactgcttaatgaaggcaaccattangtccctccaagaatgaactcgggagggtccaagttagcgtaccaggtaacagctacccattaagactttcttggaagaaatgtattagtagttcctcatcttttgcgtatacccccatcttccgacaatacnatcttagaatggtcttggagcaagtagtccccttgtacttgtcanagtccgacacccttgaac

SEQ ID NO: 14881 - DNA, 425 bp, Glycine max
ctttggctattgagagccaaagaattatttctctctgacctttcgtcttgctgaagttcttgttcatgaactttgagagtaccaacaagttcttcaagggacataaaatcaagattctttagagcccttaatggtggtacccatggtctctattttttagacaaacttctcaagattttttccatatgatcatagttatcataagttctgcttagagatattaattcattaagaatggtttgaaagcatccaaacatactctgtatgtcttcgccttcttctatagagaagagttcatatttacgagtaaggagacctagtttggtcatctttacatgtgacgttcattcacgtgttatagctaaagtgtctcacatctggtttgcactcttgaagctaagtactttggtgtatctttctctcat

SEQ ID NO: 14882 - DNA, 470 bp, Glycine max
  unsure at all n locations
gatgcacgaatgcatacgaaatacatgtgttaatataatatgggttaaaagttaaattagaaagaaaaaaaccatgtttaacatagatcatggtgaattggcttatatatgttttcttacaaaaacgaattcgtactccaaaacatttttcttaaaacttgggttacaagggtcaactaatttttctcaccaaatagacatattatattanagtagtatcttctgttatgattccatatataataaatatggacatgagaatttaaacatttaaactcctcgccatcacatgctcaatgaacataattattgatcaattatatgttacaccgtattggtaaaaaaatgaaactgtttcacacgtgcataaataaatgaattcaaatcacacataatatgacgttgccaatgaggcacatcttgtgctnntttggtattattaaataaaattaatattagcttacaaaaaa

SEQ ID NO: 14883 - DNA, 401 bp, Glycine max
  unsure at all n locations
aatcaacacggaggtagtaccctctcatacacaggagctactcttttccttggcgagaaatcaacaaatacttggaattagaactggccctaccaacattacagatagcctaataacagccaggaaggcagtgaaggctatctcccttcatagacaccgaagcaacgtggttcgaactgtgtgctttgacctctcgtctgatttaggccacttcgattcaaagattaccgacatcctctcagctctatgctgaggtgaaaggtatggaatttcatcaatcttcaacggtgacttgtaccctatactcagcaacgggtttatccaaatccaaaaggccttggatattgcagaagctgnagcaaagccacgaacgttggatttgcatatagntttgttcctca

SEQ ID NO: 14884 - DNA, 430 bp, Glycine max
taatagctaagctcacctccttgagatgagaagctagagcttagctacacaccccctataatagctaagctcacccccatgacaaaaaacatgaaaataataaaaaaaaagtccttattacaaagacaactcaaaatgccccgaaatacaaggctaaaaccctatactactagaatggccaaaatacaaggcctagacgaaggaaaaacctattctaatatttacaaagataagcgggctcatacttagcccatgggctcgaaatctaccctaaggctcatgagaaccctagggcctttccttggatctctagcccaatctacttggagtcttctagccaatgccctcgcggggtaggatggcatcattccctccaccttggaaagggattgacctcaaatcccgaggttcttcatactctgggctcctt

SEQ ID NO: 14885 - DNA, 448 bp, Glycine max
gctagagcttacctagttctacttctctaatagcaaagctcacctccttgagatgagaagctagagcttagctacgcacccccgataatagctaagctcactcccatgacaaaaaacatgaaaataataaaaaaaaagtccttattacaaagacaactcaaaatgcctcgaaatacaagggtaatactctatactactataatggccaaaatacaaggcctagacgaaggaaaaacctattctaatatttacaaagataagcgggctcatacttagcccatgggctcgaaatctaccctaaggctcatgagaaccctagggcctttccttggatctctagcccaatctacttggagtcttctagccaatgcccttgcggggtacgattgcatcattccctccaccttggaaaggatttgacctcaaatcccgacgctcttcatactct

SEQ ID NO: 14886 - DNA, 467 bp, Glycine max
  unsure at all n locations
aagattcctaaagaagctagagcttagctacatatacctctctaatagctaagctcacctccttgagatgagaagctagagcttagctacacaccccctataatagctaagctcacccccatgacaaaaaacatgaaaataataaaaaaaaagtccttattacaaagacaactcanaatgccccgaaatacaaggctaaaaccctatactactagaatggccaaaatacaaggcctagacgaaggaaaaacctattctaatatttacaaagataagcgggctcatacttagcccatgggctcgaaatctaccctaaggctcatgagaaccctagggcctttccttggatctctagcccaatctacttggagtcttctagccaatgcccttgcggngtaggattgcatcattccctccaccttggaaaggatttgacctcaaatcccgagggtcttcatactctgggc

SEQ ID NO: 14887 - DNA, 462 bp, Glycine max
  unsure at all n locations
tactaagctnttctctgtacacctacattcctatacacgaaaactttttctgtatacacacgcattaaaaaactctntctctttatatcaacatggtctatataaaacctttattccttttcaaagatttcttcttcctttttcagcatacgctcgttgtttatacaaaaattttctttatatacactcattgctcacacacaagaatttcttttcacacattatttatacacaaaatcttttcatacactttttatatacaaaaactcttttcttttctttatatacatatatgacattttgttcacaacgcctctttctttttctattcttggggttatcatgatgtttggtcgttntattttaggatgacgttcctaaatgaaaactctacacgggtccagaatttcaacaaacattattgacaataacgaagtaacactaatgaacagtccaaacaaa

SEQ ID NO: 14888 - DNA, 457 bp, Glycine max
tgcgtcaaccatgaaccatgtcataccaggcttgtcaatttatatttgaataaaatatccttttaaatacccattacacaacaaacaggtggattcaaaaatcaaaggcattgaattgaatgacccacacaaagccacaagagaaaaagaaatgacattttggcacaacccaattgaaaatcttaccaaccccagaaagaccaatccggaaaagggatgtcaaagtgttcctttgtggtgcaataccgaaatagaggcaaaggcattgcttggtgttcagtcttattaacagaaggtttatccatgcaatcaaacatcatatccacatctggcaccatcccagggtacctcctcataagctgcaacaacccccacagtgtaaacattgccctactctgcacacaagcatagtaccaatccacaaacaccttcccttcaacaatcaccactctgaacg

SEQ ID NO: 14889 - DNA, 346 bp, Glycine max
  unsure at all n locations
agcttcanaattcaatntcgagcgtctcaatagaatacggtactcaatcagacattcgagcaaaacattatttgtcgttgaattagctcagagcttcagaattcaatttcgatcgtctcgatatattacgggtctcaatcagacatctgagtaaaaaagttattattcgtctgaattgctgagagcttcaacattcaatttcgagcgtctcgatgttttatgggacttaatcagacatccgagtaaaaagttattggccgttgaatttgctgagagcttcaacattcaatntcgagcatctcgatatattaccggactcaatcagacatccgagtaaaaagttatc

SEQ ID NO: 14890 - DNA, 474 bp, Glycine max
  unsure at all n locations
agctctgataaanaccgagcagttctaataagatttgtttatgaatacccttacgctctgcagatatataaggtgacattttaggaattccatttctagtaccgcggccaaaatgaactcctgcttccatcatctctttcaagattatgttccaatatctttttgtcatttatatttatccccacacttttctttcatttcaaaatcgaaattctataaattttttgaaatgaaagaaagagacccggtatactgaaatagaaataagtgttcaaaagaaccttctcttctaccgaagaatggcctttgataaatgatcgggccatcttttctatttaatatataatatgagtattctctttaattatcttctgttattatacaaaataaaatgaccgaagatgaatccgctcttaagaaatcattatttagggaatattaaatactagattgctgcgatgtatcgcataaatt

SEQ ID NO: 14891 - DNA, 252 bp, Glycine max
gatccttaagcactgagctgcactgcagctgcgacacaacaattatctgcttacatgttgacaagcattaccttgcttcttgagcaccaaagatggtgttgtcaaaatttgaaaacatacccagtagtgcttttcctatcatccttatcaccacaccaatctgaatcactataaccaataacttctccttctatattcttctgactgtaaggatataaaatgccaagatccaatgttcctttcacatacctt

SEQ ID NO: 14892 - DNA, 368 bp, Glycine max
  unsure at all n locations
agctnggaaggtagtcatacctcacaaagtatatatatgtatgattgggtagtgaatatacctaagatatgcatgtatgtaaacaaaaatacttcacaaaatatatatatatatgtatgtttagatatgcatgcatgtaggaaaaatacttcacaaaatatatatatgtatgtttaggtagcaagatacctcggatatgcatgtatatagcaaaaatatctcacanaacatatatatgtatgtttaggtagcaagatacattggacacgcatgtatatagcaaaataactcacaaaaatatacgtatgtttaggtagcaaattacctcatgaaaaaaaagagcaaaaagagagtgagcaagaaaggaa

SEQ ID NO: 14893 - DNA, 409 bp, Glycine max
  unsure at all n locations
agcttcaaaaaatggcctcatcaacttcttattccctgaatgaaattcaataaatacgcctcctatatttaatggagagggttaccactactggaaaacccgaatgcaaattttcactgaggcaatagacttaaacatttgggaagccatagaagttggaccttatatacccaccatggtggctggaaatacaataatagagaaacctatagaagagtggtctgaagatgatagaagattagtgcagtacaatttaaaggctaanaacatcattacttatgccctangaatggatgaatattttacggtttcaaattgtaagagtgctaaggatatgtgggactgatgtgtcattattttctcctattatcttaacccttttgtcaccaatttaattactgattaactc

SEQ ID NO: 14894 - DNA, 408 bp, Glycine max
  unsure at all n locations
agcttcttatccaaggctcatctcggtggtgaagctccttcttccatggcttattccatagtggatggcgcctcctctcacctcttctcctttgtcttccactgcatctccatggtggaaaatcaccattaaaggacctcattgaagctcanagatccagcctccatagaagccccacaagcaagcttccatcatattcctccacccgggattgtatctattgctggagaggtcataattgttctggtggtggaatttgctgctgagtttgaggaggtctattgtagatgtttgcagcataagcttcaggctgttcaattgttccatatagttgcacagaagggcaaaggtctgtatggtggtcggcagaggagcataaaccacagaatcttgcgatatgtacatatt

SEQ ID NO: 14895 - DNA, 371 bp, Glycine max
tgatgcagctgagtttgtatcttcctcatgcactcctctaatgaatataacatcatttctggcgctaaactgctgggagttggaagccatcttctcaattaaatgtctagcttcaataagagtcatgtcttccagggctccaccactggcagcatctatcatacttctctccatattactgagtccttcatcaaaatattggagaagaagctgctctgaaatctgatggtgagggcaactagcacatagttttttaaatctctcccagtattcatacaggctctctccactgagttttctaatacctaagctatccttcctgatggctgtggtcttggaagcaaggaaaatgctttctaagaatactctct

SEQ ID NO: 14896 - DNA, 431 bp, Glycine max
  unsure at all n locations
agccttcaagaattaagatcattattcattctagaatcatgagaagacttactctagatcagtattaacaagcttttttcaaaaactgagtagcacatgaatctttctcaaaacctcttaccaaagaagttttactctctggtaatcgattaccacattattgtaatcgactaccagtaccaaaataattttcacatatctttcaactgaatttacaatgttccaattgatttcaacatgttctaatctgatacaatgttttggtaatcgattaccagtgtgtttgaacgtcgaaattcaaattcaaatgtgaagagtcacatcctcttccaaaagagctgtgtgtaatcgattacactaatnttgtaatcgattaccagtgatagtttctgaacatattaagagatgtaactcttcaaatacgttttaac

SEQ ID NO: 14897 - DNA, 439 bp, Glycine max
  unsure at all n locations
aaagcccagtcaccttcctcagaaaccacatcttaatttcaagtccaatttagagaaaattgtagctcctccaatttcatccgacaactctacaatcaccagaattggaaaattgctaggaagggtaatattggttaaagtactatagtcaaaacagaatctccaccctcgtccctcttcaccaaaacaataggaatgacaaagggacttacacgtggtctaatgatgcctgtcatcaacatctcattgactacttttcaatctctgccttttggtaatggggatatttacatggccttatatttggaatttgagcatctgctttcagcactattgcatgatattgtctcctatgtgaaggcagactntgagggccctanaagatgtcttgatatttatctaaatcaccctatatgaatgtngcaacttcaatctctat

SEQ ID NO: 14898 - DNA, 491 bp, Glycine max
  unsure at all n locations
agcttgagcagaacttanaaactntgaataggaagctcattctgtggttcacacatatcatcctctnaaactaataccaacacaccaccactccacttccacttncacttcgtaccccattgcccagaggctcttcactatgtgaaggtatggngaagggatattgtacgcagccttactcttgcatatgcaaagaggctgtttccggattcgaacccatgaccaacaagtcaccaaggcacaactttaccgctgcaccagggctcgccctcaccaatacaccaccactgaacaaaaaanaatgcaacataatccaccactttactttcatcaattgtgagagaatgtgtcgccaatcttccaaaaccacttaaagtanagcatcagatgatcaactactatcatnttcatcaattataaaagaantttatcatacagagtgtgaagggcaaccaatatcacagagtgtgatggtgtcatatatgatatgt

SEQ ID NO: 14899 - DNA, 292 bp, Glycine max
tctgaattggtccagagcttccttgttaagtttcgagcgtctcgatatattatgtgtctgaatccgacatccgagtgaaaagttatgacaattttaatttctcgagaacttccattattcaatttcgagcgtctctatatatcatgggcctcaatcatacactcatgtcaaaagttatggccgtttgaattgaccagagctttcttgtttaattcgagcgtctcgaatattatgtgcctgaatctgacattcgaggaaaagttatgaccatttgaattctctagattccatt

SEQ ID NO: 14900 - DNA, 443 bp, Glycine max
  unsure at all n locations
tcacatagtccgcctttgcttgaccttctttattcttaaaaacagaaacattatgcatatgcaaaagatcaagaggagttagtatgttaaaaccctcttccatttctaaaggagagcaattactattgctatgaacaactctattggtagcaaactcaacatggtgtaaacaggcttcccaangttttaaagttcttctctaaactgtcataagcaaagttcccaatgtcctattaacaacttctcgtttgcccatcggtttgtgggtgacaagtggttgaaaataacaatttantgtccaacttgccccgcatagtcctccataaatggcttaggaacttaaagtccctatcactaacaatgctccttcgcanaccatggagtctcacaatctccttgaaaacanatcaccacatgggaagcatcatcaacttttttacatg

SEQ ID NO: 14901 - DNA, 311 bp, Glycine max
  unsure at all n locations
agacactcgaaattganaacgaaaactcgtagcaagtgcataccgcaatcactcttaaatcgtcgcgaaatagatggacatgctccaatntgaaaaagaaagttcatagcanattcaaacgacacataacttttacacggatgtccgattgagtcccgtaatatatcgngatgctccaacatgaaaacggaagctcctagcanattcaaacgacaataactttntactcagatgtccgacagaggttcgtaatatattgagacactgcatattgagaacagaagctccgatcanattcaaacgacaatatc

SEQ ID NO: 14902 - DNA, 416 bp, Glycine max
  unsure at all n locations
gcttccgtgattcggaagctcttgctttctcaccctgaagnggagtttctctggtggatggacagtgatgcaatgttcaccgacatggccttngaggtgccatgggagaggtataaagattcgaactttgttatgcacgggtggaatgagatggtgtatgatgagaagaattggattgggttgaacactggtagttntctgttgagaaactgtcaatggtctttggatattctngatgcttgggctccaatggggcccaaggggaagataagagatgaagctgggaaagtgctcactanggagcttaagaatanggcctgttttgaagctgacgatcaatctgctatggtttatttgttggcaactgggaaggagatatggggttgacagggttaccttgagaatcactactactt

SEQ ID NO: 14903 - DNA, 358 bp, Glycine max
  unsure at all n locations
cacatcttcttatgtgggtcttgaatggctatcaaaggcctatatatatgtgacttgagacacgaatntgctaagagttctttggatcaaaaaggtcttatcctcttaaaaagcacaatcgttttatcctcttacanattccttggccaaattacttgtgattcaataaggaattatttgagtgctcaaattgttcaatctatctttttcaagagagatatcttcttttcttcttcttcattctgaacagggattaagagaccgagggtctcttggtgtgaaagaattctaaacacaaaggaagggttgttcttgtgtgtctagaacttgtaanaggaatttacaagatagtggaact

SEQ ID NO: 14904 - DNA, 321 bp, Glycine max
  unsure at all n locations
ctctagtgntagntntgcctaacccgagggaaccctttgaggtgtattgttatgcatcaaagatgggtttaggaggagtgttgatgcaaaatggccaagtagtggcatatgcttctagaaaactcaagactcatgagaggaattatcccactcatgacctggaattagctgttgtggttnttgcccttaagatgtggaggcattacttgtttagctccaagtttgagggttttagtgatcataagagccttaagtacttgtttagtcagaaatagctgaacatgcgtcagaggagatggttaaagtttcttaaagattatg

SEQ ID NO: 14905 - DNA, 415 bp, Glycine max
cttgattaattatccacaatggcaagctgagaggctttgtccttcccaatatgtcctggaaacatggcaataccatgccctttgtcctgaaaagagtttgcagccctgccgggaacattcccatgcaactctgtggagggtacaacattaagattgctgggcttagccccgtatagtgatgcagaacctgctgctgctggccagaatgaattcatcctcgcaatttgctggtgacacaatatattgcgagcaatgtagcagtgggttgcacaccttttcggccgaggctggttaaaaagaagatggggaagctgtaatttaagggagaaagtgattaatcaggaattcaattccacattgtttcaaaatcataagtttaaaaagggggaaagtaccggtattgctgcagatgtca

SEQ ID NO: 14906 - DNA, 517 bp, Glycine max
agcttgtgcatccaataccttgatgaggatgtccatatgttcttaaaactggactgatccatttgcttccaaagtttcatggccttgcaggtgaagacccacacaagcatctgaaagaattccatattgtctgctccaccatgaaaccccccagatgtccaggaggatcacatatttctaaaggcctttcctcattctttagagggagtggcaaaggactggctttattaccttgctccacggtccatcacgagctgggacgacctcaagagagtattcttagaaaaaattttccctgcttccaagactacgaccatcagaaaggatatttcaggtattagacaactcagtggagagagcctatatgaatactgggatagatttaaaaaattatgagtagtttccagcaacaggtacaatcccgggtggaggaatcatcccaaccttagatggtcgaatccttcacaacaatagcagcagcaacaacctttattttcaaaatgctgctgccccaagc

SEQ ID NO: 14907 - DNA, 244 bp, Glycine max
agcttatatgtttttcacaaattgggcatgggcattgttctttaacattatatcacttcaaaaattaatatgctggaaattcgttgatggaataaaataccattgcatgcaacttgatggtctgttggtggtacccatccaaaacgccaaccttgtccttccccaactttcttaaatttttaaccaagggaattaaattatcatcaatgttatttcttggatgtcttggacctgaaattatcat

SEQ ID NO: 14908 - DNA, 562 bp, Glycine max
agcttctaaagtagtataatgaagttggcttttatgaggagttaatatctgacctccaatactaaatgccgattcagaagctacaggggagatcggaatagctaacacaccccttgcaattgcttgtagtgttggatactttaactcattcaatttccaccacattaaaatatcaaaatctgaacttcttggcaaaacttcttcctctaagtaatgatctaactctgttttcatagttaaggttcttgccattttctttctttcaatgtatctatcataatcacacaatttactctttccatcactaaccacatcttgtgattcaaaagaactagtagaatcttgatgctttttggcttgatattccgaaaccaaatcataacacaagtttcggatcctattaacttgagaaaaaaaatcaatgggataaattgattcaaagtaaaactcaagcaactccattttgtatcttggatctaaaacaatagcaacttccatgatcacatgaattacactcccataaaaatcaaatttttgtaacatcttttttggcctattttga

SEQ ID NO: 14909 - DNA, 530 bp, Glycine max
attacattaaaatactaaccatattattttaattatttttttaaatatattaaaggtaaccaaattaattattttcctattaacggaaatctatattatcataatatattaaaatattaacgtaaaggcgtttcctttttaactataactcgacttagtggacacaagtaataatcacccactataagtccgacaagataaatatttttttcgtgtccatgcagttgcctattaagtgtacattcataaaacttacaattactttttctataatataaccatattaaaatattaacgtacattaatatattaaatatattatcataatattcaaatttactaacataattacgttaaacatacgtataaattatattaacataaacataattaatatatatatatatatatataatagacatataaaatacataacataaatgtgttatatttattaatataaaataataacaatattatgaaacctatcattaaataaatataatatgtgtattaacgaataaaaattt

SEQ ID NO: 14910 - DNA, 634 bp, Glycine max
  unsure at all n locations
agcttattgaatatccacgaataacacactgtatatgtgaagagattgcacactttattcaatcatatgaaaatgaattttataagccttacagacttgactctcaaaacagaataacaataaaaacaaaaaccacaaaactgcatgacgcataaaataggattgtttattgacacattaaaataactaacattaatttgtattttaattctcttttaatcactatagtttgaaattgatctttttagttcctataatttgtattttaattaccttttagtccttactgcaataaatatataaaataattagctacaaattagttataaattatcaactatttttttattacaaattatcttgtgataaattagttatgaattacttgctaatatttttgtagntaattataattgataatattactcatattttgatgggaagaactaaaatgaaaatcaaatataaagtatagggactaaaaaggtcactttcaaactatagtgactaaaagaaaattaaaatgaaaatgataaggactaaaaaatcattttcaaactacagagactaaaagagaattgaaatgtgaacttttatacttaaaaaattacttttaaactataatgactaaaag

SEQ ID NO: 14911 - DNA, 488 bp, Glycine max
  unsure at all n locations
atcatcaatcacctagctgaccaatttttgaggaatttgtggcttcccataatggatacaaatacaagggatcacattcacaaacaccattcaaatatggaaacgttactgatattcctactgcagtggattggaggcaaaatggagctgttactgcagtcaaggaccaaggccaatgtggtaatcaagtaacagagaacttttatttatttttttatcagcaggaatcaaaaacaggtaccagggagtttacaataactcacgtaccttgctcaatcatctgagctagaccacctggattaacacaaagaaaatgaaccctnnattaaagtgatactattttcttttgtatatatcattgtcatgatggcattaattaaaattggttaatttgtaaatgaattaaacaggtaactgctgggcatttttaacagttgctgcaacaaaaagtatctaccacataaagacaggtatgctaatgtcccttt

SEQ ID NO: 14912 - DNA, 390 bp, Glycine max
agcttcggttatcaatttcgagtgtctcttttttattacgaggcttaatcagacatccgagtaaaaagttattgtcggttgaatttgcaacgaccatcaacattcaatttcgagcctctcgatatattacgcgactcaatcagacatcagagtaaaaagttattgttgtttgaattggctgagagcttcaacattcaatttcgagtgtttcgatatattctgggactcaatcagacatccgactaataagttattgtcgttgaatttgctcaaagctttaaaatgcaatttcgaggggctcgacatattaccggactggaacaaacatgcgagttaaaaagtattggcgtttcaatttgctcccaactttcacattcaattttcatcgtc

SEQ ID NO: 14913 - DNA, 378 bp, Glycine max
ataaattaatgacctatttagtttagtaaccctaaaccctaattagtcacgtaaccataaatactaattagccacataaccctaatccctaattagtcaagtaagacaaaatcataattagtcaagtaacactaaaccctcattagtcaagtaaccctagacccccattagtcaaataactctgtcatcaaaacactaaaacataaataattatataatgggtgatgtttgtttctaatttatttttcgacagtcaatacttaagtcaaaaaataaatatacaacgttcaataaacacacttattatcatatacatgacaccccataagggactaaggtcatcttccctaataacaagcctattcaacctcgtaattg

SEQ ID NO: 14914 - DNA, 356 bp, Glycine max
  unsure at all n locations
tacatctttctagttgcattntcaccttatcagaagagactctgaaaagttaagatacaactcataatgctgtcaattgaatatgtaacaatcaccacgatggcatgcctgatgcaaaggatgagatctttggtccagtccaatccatattaaaattcaagtaagacaacaactagtgttagttaattactctgcagagaatggtattatactaccatacatgtgttgggctttgtgcattaatttttgtgttgatgactccagggaccttggtgaggtagttcaaagagcgaacaacacacgttacgggcttgcggcaggagtgttcacaaagaacatggacactgcatacactt

SEQ ID NO: 14915 - DNA, 363 bp, Glycine max
  unsure at all n locations
tcaggttttcgccttcgataaagaaggcctcaatcgacgtcattggagatttccgtttggtcagaggaggtcaaagaaggggatgagaaaagcgagagttctctcggaacggtgtcgtttgatctgcaagaggtgcctaaaagagttcctccggatagtcctttggctccgcagtggtacactctcgaatccgaaacctcgccggcaaatgacgtcatgctcgccgtttggatcgggactcangccgacgaggcctttcangaggcttggcagtccgattcccgcggcttgataccggagacaagagctaaagtgtatctttctcccaagctctggtatcttagactaacggtcatccaaacc

SEQ ID NO: 14916 - DNA, 421 bp, Glycine max
  unsure at all n locations
catgcaagctcaatggccatggtgattgagaaggagtttacattatgggatttcanatcatgcttctattntgctttttagacatgactcttgcttcaataacatggtttgctagtcttgtaaccaccaacctagtaccattgcataacccttgtgattgatacatgttccttaaaagcattattggggtacccacctttagttttatcttatgattaggaagaccaaatgttctcaaactattgagaaattcacttgtgaccacttcaagtgcatttcattcaaccatttttgacttgtcaattgaataagaacttagatattccctttgatcacctgaaaacaattcattaataaaaacattgtagaatcaatattaattattaaatcaattgatttatttgtgagatacctggaataa

SEQ ID NO: 14917 - DNA, 440 bp, Glycine max
  unsure at all n locations
tgctntctattgatttacttgattgtgcttttattcaccaatttaatgcaagttaattaatatgaaaaatatttacgggtcattatttgattgtcaatatcgatgggagatataaaaaatcatttttttaattntatataaaaanatgtaaacaaatagtaataattagttatttaatataatttgtaaattaattttaatccactctaatggtttagactntatttttagtgaatcaacataaatattcctccgctgtgctgttccacgtgtgtctctagatactctntttcataatttcattgtttggtctaataaacagccaatgtacttgttgttataattgagagtagttcagggaaaacaaacaatccaaaggaattctatatatcatgaagctctctgtaaccttgatatgcttagctgtatgtccatctatg

SEQ ID NO: 14918 - DNA, 419 bp, Glycine max
  unsure at all n locations
atcggacatccgtgtgaaaatnatttatctttgaatttctcaagagcttccgttgttcaatttcgagcttctcgatatgtgatttgcctgaatcggacatccgtgtgaaaagttataccagttgaatttctcaagagcttccgttgttcagttntgagcgtctcgatatgtgatttgcctgaatcggacatccgtgtgaaaagttatgaccatttgaatttctcaagaccttccgttgttcaatttcgagcctctcgacatattatgcgaccgaatcggacatccgtgtgaaaangtatggncatttgaatttctcgagagtttccgatgtttaatttcgagcgtatcgatatattataagcatgaatcggacatccgtgtgaaaaggtatgaccatgttgatttctaaagaactttca

SEQ ID NO: 14919 - DNA, 429 bp, Glycine max
  unsure at all n locations
agcttgtacattcaatttcgagcgttccgattattacgggactcattctgacatccgagtaaaaagtaattggtggttgaatttgttcagagcttcaacattcaatttcgagcttttcgatatattacgggactcaatcagacatccgagtaaaaagttattctcgtttgaatttgctcagggcttctgtattcaatttcgagcgtctcgatatattacgggactcaatcagacatccgagtaaaaatttattgttgtttgaatttgctcagagcttcaacattcaatttcaagcgttccgatatattacgggactcaatcanacattcgagtaaaaagttattgtcgtttgaatttgctcagagcttctacattcaatttcgagcttttcgatatattacgggactcaatcagacatccgagtaaaaa

SEQ ID NO: 14920 - DNA, 291 bp, Glycine max
  unsure at all n locations
tttcttgaatcggaccttagtgtgaaaagttttgatcatttgaatttctcgaaagctttcggtggtcaatgacgagcatctcgacatattatgcgctcgaatcgaacatccgagtganaagatatgaccatatgagtttctcgagagcctccgtggttcaattccgagcatcttgacttattatgtgcccgaatctgaccttcgtgtgaaaaggtatgaccatttgaatntctcgagagctctcgattgttaatttctagcgtctcaatatattgtaagcctgaatcggag

SEQ ID NO: 14921 - DNA, 261 bp, Glycine max
  unsure at all n locations
gacatgatcatccgaatcgacgacacgtcgtatcgctccacatcaggactcttagcaatggccaaaacgattggcggcacaaacggcgcgacgctcacattgtgtttctgcaccaactccagcaacgcaactatatcaaacttcggaacgatcaaaacggcagcctcaactcgaagcgaacacagcanaacagagttgagcgaataaatgtggaatagtggcagaacacacactaccacatcgtcgctgcgaaagtacaaa

SEQ ID NO: 14922 - DNA, 235 bp, Glycine max
  unsure at all n locations
tcttaagttcttcttaagtacttaagtatggtcttaaccactttctaatgttcctcaccagggttntcttgatatcgacaagttacacctagtgcataagcgacatcaggacgtgtacaagtcatggtgtacatgatagctcccactacactagcatatggtactctactcatgtgttctctttcttcagaagttgttggacaattctccctactaagagcaattccaacaccta

SEQ ID NO: 14923 - DNA, 324 bp, Glycine max
  unsure at all n locations
atgctacattcatatnccagacgtgaagaggcacaagcttgaagataagactatacgaggtatcttccttgggtatagcaatatctctaagggctaccgtgtctacaacttgcaaactaagaaactcgtcatcagtcgagatgttgaagttaatgagtatgcttcttgcaattgggatgaagaaaaagtggagaagaatgttcttatacccgctcaactacctcaagaagaagctgatctagaagacccaggtgaaccaccttcaccttcaccacaacaacaagatcaagaactatcatcaccagagtctactccaagacgagt

SEQ ID NO: 14924 - DNA, 360 bp, Glycine max
  unsure at all n locations
acctagaatctgagaataacaacacacatcatcttcctgagcatcatgaactngtcaatcttcaaagccttggtcataatatctgctacctgcaagtctgtcttacagtgccttcaaatcaatttgtctttgttcacttgatctctcaggaagtggaacctagtttctatgtgtntacttctgccatgtgagactggatttttggccaaatctatagcagatntgttttccaccaacagctccacagtcccactcatcttcacattcaattcttccagcaagtgtgtaatccaattggcctgacaagcagcactacaagcagaaatatattcggcttcacatgtggaaagagcaatcacg

SEQ ID NO: 14925 - DNA, 368 bp, Glycine max
  unsure at all n locations
acaaagagagtggaaaatttcaagtgggttgcttgaggactggacgtanacacnggaagtggccgaaccactataaatcaagtgtgcattccttctttccttaaacttctattatttattgctatntatcttctgctgtagagacgtttattttgaattgtcttttgagtaattcatgttaatggtgcattgctaatccaaaaagagagagtgacagtttaattggcgaatagtcttttgtatttaattcaaccccccaccccttcttaagataactgaggccatttgtccaacatcctattcttgataactcacttctctctaaaaagacaaactttccggaatgataaaatgatgtcaaatgaact

SEQ ID NO: 14926 - DNA, 228 bp, Glycine max
atgagcaactcacgattcaacagatgtgacatggaccattgctgctacgttaagaaatatgctaatagctatgttatccttgtcgtgtatgttgatgacatgttgattgcaagatctagtatgacagaaattaacatgtttgaacagtagttggcagaaaactttgaaatgaaggatcttggtctagctaaacaaatccttggtatgagaattcttagaaacagatca

SEQ ID NO: 14927 - DNA, 335 bp, Glycine max
  unsure at all n locations
tagatatgcnaaaggcacacactgatttggaataagataccattatgctaaaaacttcagacttcatggntattctgatagttgatgggctggatgtgctgatgatatgagaagtaccttcaggtatctttntagctntggttctagaattntctcatggtattcaaagaaacaggaagtaatagctcaattcacagcagaagcagaatatgttgctgcaactgctgctgtaaatcaagctctttggatcagaaagcttatgacaganttgcatatggaacaacaggacagtacgcatatatttgtggataatcaagctgcaatctcaacttcaa

SEQ ID NO: 14928 - DNA, 205 bp, Glycine max
  unsure at all n locations
taacccgagagaaccctctgaggcgtattgcgatgcatcaaagatgggtttaggaggagtgttgatgcacaatggccaagtagtggcctatgcttctagacaacttaagactcatgagacggaatatcccacccatgatctggagntggctgctgtggttttgcccttaagatgtgaggcactacctgtttggctcacagttgag

SEQ ID NO: 14929 - DNA, 229 bp, Glycine max
  unsure at all n locations
tgcacaccatggatttggcggaagacacaatgtcagtatgttgcngctatttacacctcctcctcgaacaaggccattacgaaatgcatagttcacatctaactggtgaagagactaaccataggcgagagccacagagagaagaagtctcactgctatgggcttgatgacaggtgagaaagtctcagtgtaatctgttccatattgctgatgaaataccttagctacc

SEQ ID NO: 14930 - DNA, 384 bp, Glycine max
  unsure at all n locations
tgatggggacctggttgaaaattcagaggtggatgatgattgcatggtttctccagatctgtttaaaagtgttagtttgcctacatatccactggaaaattttgaaggtcgtgcgttctgctttttacctttaccaatcagtactggtcttcctgctcatgtaaatgcatactttgaattatcatcaaatcgcagggatatctggtttggttctgatatggctggaggtggaagaaagcgctcagactggaatatttacctcctcgaaaatgttgttgcccctgcatatggtcatttgcttgagaagatagcatcagagattggcccttgcaatntgttcttctcgttatggccaacatcattagggttagaaccttgggcatc

SEQ ID NO: 14931 - DNA, 399 bp, Glycine max
  unsure at all n locations
tgaagtcagctatgaccactactctgtgccttgccctgccggacttcagtatcccatttaccgtcgagactgacgcctctggctccggcatgggtgtagtcctcatgcagaggggacatcccctggctttcttcagcaagcaattttgcccaaaattgctccgctcatccacgtaaattcgagaattacatgccatcaccactgccgtcaagaagtggaggcaatacctcctgagtcacaccttcattattctgacggaccacaagagtctcanggaattgatgactcagccggtgcagaccccagagcaacacgtgtatctagccaagctcctcggctacgattacactatacaatacaaagccggtcacaataacgccgtggcagatgccctatctc

SEQ ID NO: 14932 - DNA, 393 bp, Glycine max
tattagaccgattgaattgtgagagtgagatttttctgagagaagtttttaaaatgtttatgagagaaataaaaaatatgaccatgaactcggaaagaactttattgttattatattttttattataaatataaataaaatacgcaattgaaaataatgttagatttcattgaatgggtaaacaaatctttaaaatgattatgtttgttccaatatttaaaaagatttgatttctataaagtatcaatacatttattacaataatacgagggttttcttttcacaagaattggaatgtatgatgagtaatttttccttttagttcacgggacttggtatattgcaactaaatctatcttactaactctattattgttttttgtttattactag

SEQ ID NO: 14933 - DNA, 370 bp, Glycine max
tgagccttccacaaattctggaatgtgacctgttataaaattgtttgacacgtctataacctccaaagagctgcttgtcctgtcatttatgattgttgatagtgaacccaccagcagattatcatgcaaatctatggaagacagttctgttggtaatttgatttcagaaatgtcaaacctcagctggttgtttgagagcttgaccttttgcaagctggacatgtttgtgaagaaatttgaaataccatccaccagatagttatctgataggtcaatagagctgagagagtcaggtcttgtgaagtgtggaagatctcccttcaatttgcacccagctagatggacatctttaagctgcttgcttctgatc

SEQ ID NO: 14934 - DNA, 389 bp, Glycine max
  unsure at all n locations
atcaattactactgaattccttaattcattgaacacatncggntngccaactcattctatcaaacttaaaattggaagtnctaataatgtgntaaggaacctcgaccaaaatcaaggtctatgtaatggtactagattagtggtaacaaagatggcaaaacatgtaattgcagctgaaattatctcaagtaaaaacattggtctcgcttgttatattccaagaatgtcaatgtccctttcacaatcaccctggcccgttaaactattaagaagataatttctgattatgctatcttatngcaatgacaataacaagtcacagggacaatcactatnncatggtggactnntattgccgaaacccatattcactcatggccaattatatg

SEQ ID NO: 14935 - DNA, 394 bp, Glycine max
  unsure at all n locations
gcttacaactggagaaaaagntcatgaaaatcattatcatgaacttgatggaatcccttagcaaccatttggccttgtctttgttgatagacccatcagcattttcttttacacgaaatacccatttacatcccactgcctgtctcatgaatgattattcctgagagcagcatactcctgctgcatggcagaaacccaattggaatctgccaaggcctggttgacattnttaggttcagtgtgggttaaaaaaagagaaggatgaaatccaaactttgaccctgtttgcatagggtgttgttagaaggtctaggaggagactcataatntgagtgtgtagacttagaggaagtggaagaggaactntgaagaagatgataccagaacctatcct

SEQ ID NO: 14936 - DNA, 384 bp, Glycine max
  unsure at all n locations
gtgagcaaattcaaacgttcattatactntngactttggatgtccgattgtgtcccgcagnatatcgagacgcgtcgaattgaaaagggaagctcttagaaaaatcaaacgacaataacttttaactcggatgtcggatagagcccggtaaaataccgagacgctcgaaattgaaaacagaagctttgagcatattcaaacgacaataacttttgactcggatgtccgattgtgtcccgtagtatatcgagacgctcgtaattgaaaacagaagctttgagccaattcaaacgacaataacttttatctcgggtgtccgattgtgtcccgtactatatcgagacgctcgaaattgataactgaagctctgaggaaaatcaaacg

SEQ ID NO: 14937 - DNA, 467 bp, Glycine max
  unsure at all n locations
agcttatattgatttctttgaaccctatctntactctttttcatacccccaacaagaaagaaccacaacttaggaaccaacatgattgatcattcatctagtgttaatagtaagggtactagtcatacggaccctctatctagaatattaagtgagttgagttccctcaagttatggaaagaacaactagaaagaaaattaaaaggaaaagaaagggtagaaataagtaaagatgagagggaacatataagggaagaagaaagaaggaaaatactaatagttaagaatagagcaacatgctctctatagtagtcatgactccttcaagagcctaagtgaagaacatagtgactattatggaggaaagcataggtcacatnctagacctcactcncataggagaaaaaaaggaaagaaaggatcaagaggctaacattaacctctcatacttccatgggaaggacaat

SEQ ID NO: 14938 - DNA, 361 bp, Glycine max
  unsure at all n locations
ngtctaattgaaataagctgtttagagcttattctaataagcttttccatcgagtttattgaaacaagttgttcaatagactgcaaaacctttttttttttgtctttattaggattgaataatgcaccaaagttattgttattgctgatgtgcatagatgttgacagggctgatttttggtcttttgggattacggcacttgaattggctcatggccatgcaccattttcaaaatatcctccaatgaaggtatttacatcccgtggttgttcagagacaatgtctagacacatgttaacattggaccgattgaagttcatgtgatataatttgtaataaaagaaaaagagagttcactttt

SEQ ID NO: 14939 - DNA, 358 bp, Glycine max
  unsure at all n locations
caagcttgaatngngtgtcattgttgtgacaatgcttattggaggccatacctgcatatgaggcgtttctagttgaacttctccacctcgctcattgtgatttctcgcaatggtcttgcctcgatccacttggtgaagtagttgatagcgactagtaaatatttgactgctcacgattcaacaattgtcctagtatgttcattccccatatggcgaagggctaaggggaactcgggttgtggagattgtcaggagaggtgcgcggaatgtcagcgaattcctggcatcgtctacacttctttgtgaagtggatggcgttagccatgagtgttggctaatagtagcttgcgttcaccac

SEQ ID NO: 14940 - DNA, 373 bp, Glycine max
  unsure at all n locations
attctactatcttaacattncacttggaagtccgattgagtcccgaaatatatcgagacgctcgaaatttaaaaccgaagctactagcaaattcgaacaacaataacatttcactcggaagtctgattgagtcccgtaatatatacgggacgctagaaatttaaaaccgaagatcgtagcaaatttgaacgacaataacttttcagtcagaagtctgattgagtcgagtaatatatcgagacgctcgaaatttaaaaccgaaacttgaagcatattcgaacaacaataacatttcactcggaagtccgattgagtcccgtaatatattcgagacgctagaatttaaaaccgaagctcgtacaaattcgaacga

SEQ ID NO: 14941 - DNA, 397 bp, Glycine max
gcttaacaccttgcaagttctccatattttcaatgtattaatagttgctgaaccttgtctttatcctcttctaactacaggcaaaattttcctgaaatccctacccaaaatcacaacctttccaccgaatggtttatggatgctatcttcaaattgaaatcccattaggtctaaggtgcgatcaaacacttcaaagcaaaacttgttcatcatgggcgcttcatcccaaatgattagtttagcttctataagtagttttgctcaattgttgccttgtttgatattgcaagttaaatccttattgataaccaatggaagacaaaaggtggaatgagatgttttatctccaggtaatagcaaagaagcaattccacttgaagcaacattaaggacaatg

SEQ ID NO: 14942 - DNA, 379 bp, Glycine max
  unsure at all n locations
cgcaaaagncactcaaaaccgnntcaattttcaacgccttaaacggtcctctttgcttttatcgggtaacatggaccgctcaaaagcataaaatcaacacataaatttaccgcttttgcaagaactacgtaggtctgagttcctcatcgcaattgaggatacgtaggagcaaaagccccgcctttgtcgaccaccccaagaggtcgttaatggtccaatgccttaacgtttctctcttttcaaaaacaaaagatcgctaatggtccaacgccttaacgtttttctcctttcaaaaaaacaagatatccttaatggtctaatgccttaacgtttctctcctttcaaaatcaaaacatcgtttaaagggccaacaccttaa

SEQ ID NO: 14943 - DNA, 369 bp, Glycine max
  unsure at all n locations
agcttgaatgctctattcaatggagttgacaagaatatcttagactgatttacacatgnacagnggccaaggatgcatgggagatcctgaaaaccactcatgaaggaacctncgaagtgaagatgtccagattgcaactattggccacaaaattcgaaaatctgaagatgaaggaggaagagtgtattcatgacttccacatgaacattcttgaaattgccaatgctcgcactgccttgggagaaaggatgacagatgacacactggtgagaaagatcctcagatcctttgctaagagattngacatgaaagtcacttgaatagaggaggcccaagacatttgcaacatgagagtggatgaactcattg

SEQ ID NO: 14944 - DNA, 390 bp, Glycine max
agaggagtgttgatcacaaacccatcataccacttaggtgcaacaattcaacgcacggttctggaggagcttcttgactctgtgactcgcaagaacatacaacttgtctcagatgaaatctactcaggctcggtgttttcctcctccgaattcgtgagtgtagcagaaatcctcgaagctcgccaatacaagaacgcagagagggttcacattgtttatagcctctccaaagaccttggtcttcctggtttcagagttggaactacttattcatacaatgataaggttgtgaccacagcgagaaggatgtctgagttcaccttaatatcctcacagacacagcaccttttggcttctatgttgtctgataagaaagtcactgataactac

SEQ ID NO: 14945 - DNA, 365 bp, Glycine max
  unsure at all n locations
ctgaacagaccattcagtcgttggaggaccttttaagagcatgtgtcttacagcacaagggaagctgggagagttntcttccattgatagagttcacttataacaacagttttcattctaccattggcatggctccctatgaagctttgtatggcagaaggtgtagaacatccctatgttggttagagcccggagaaggcctcaccttangaccagaagtggtacaacanaccactgagaaaattaagttaattcacgataggatgagaactgctcagagtaggcagaaaaagtatcatgataagaggaggaaagatctggaattcgagggtggtgatcatgtattcttgagagtcactccatgg

SEQ ID NO: 14946 - DNA, 368 bp, Glycine max
tatgctgcaaatatttacaatatacctcctcattctcagcagcaaaatcaaccacagcagaacaattatgacctctccagcaatagatacaaccctggatggaggaatcaccctaacctcagatggtgcagccctcagcaacaacaacaggagcctgctccttccttccaaaatgctgctggcccaagcaaaccatgcattcctccaccaatccaacaacagcgacaaccgcagaaacaaccaacagttgaggcccctccacaaccttccctcgaagaacttgtgaggcaaatgactatgcagaacatgcagtttcagcaagagaccagagcctccattcagagcttaaccaatcagatgggacaatt

SEQ ID NO: 14947 - DNA, 330 bp, Glycine max
aagccttaaacggctctctttgcttttatcgggtaacatggacccgtcaaaagcataaagatcacacataaatttaccgcttatgcaagaactacgcaggtctgaattcctcatcgcaattgaggatacgtaggagcaaaagccccgcctttgtcgaccaccccaagaggacggtaatggtccaatgccttaacggttctctcttttcaaaaaccaaagatcgttgatggtccaacgccttaacggttttctccttttaaagaaacaagatatccttaatggtctaatgccgtaacgtctctctcctttcaaaatcacaacatcggttaa

SEQ ID NO: 14948 - DNA, 440 bp, Glycine max
  unsure at all n locations
agcttgaatgctctattcaatggagttgacaagtatttcttcagactgatcaacacatgtacagtggccaaggatgcatgggagatcctgaaaaccactcatgaaggaacctccaaagtgaagatgtccagattgcaactattggccacaaaattcgaaaatctgaagatgaaggaggaagagtgtattcatgacttncacatgaacattcttgaaattgccaatgcttgcactgccttgngagaaaggatgacagatganaaactggtgagaaagatcctcagatcctcgcctaagagattngacatgaaagtcactgcaatagaggaggcccaagacattngcaacatgagagtnggatgaactcattggttccttcaaacctttgagctangactctcggatagggctgaaaagaagagcaagaatctggcgttcgt

SEQ ID NO: 14949 - DNA, 422 bp, Glycine max
  unsure at all n locations
gtcacacacaaatgataaaactataacctaagttaacaaaaaanaattacaactgtcaactggtaatcaaggtttaaaaaaaaaagtctgcaacatcaaggtttccaggtggcagggagaggcggagagctaataacaaaatcaccaaatcaaccaacacaaatctcaatatctatcaactaactgatcgaatttcttcaagcaaaaagctaacatttaacaagaatttaccaaaaaccaaggcatcacaaatccgatcgaatataatacaatctcaattcaagccaactgttcaaagattntaccaatctcgacgccaagaccctacatcccgcagatgagaaaagtggaaccgaagagcctntgcatgatctctcgcccatacacggcgagttgtcggctgtggagatcctcatcgatgt

SEQ ID NO: 14950 - DNA, 396 bp, Glycine max
ctctgcagagaacaatgcagaaaccaaaaaatacccctggttttcatactttcgttgtccatcgaggtactgaacaaaaccatcaatgagatatggaccaacataagaagccaaagtgtttaacaatacaagaaaagctgtgataagaatctccttccatgctgaaattattaacgatttcaccaacttcagtgtggtgacactattaattccaccacaatcagcctcaactttctctctgaaagttggaaaagcaccaattacactatctctgctgtctagttgaggaacatcctcaaggtccagggtcttcttattaccaacggctataagaggacccacccaagagaaggtaagaatgctcaaaattccagcatatgagaaaggggtaactga

SEQ ID NO: 14951 - DNA, 250 bp, Glycine max
  unsure at all n locations
agcttctcgatatattatgcgcctgaatctgatcttcgtgtganaagttatgttcttttgaatgtctcgagagcttccgttgctcaattgcgagcgtgtagatatttcatgcgcctgaatcgggcatccgagtgaaaaggtatgaccatttgtatttgtcgagagcttccgatgttcaattacgagggtcgcgatatgttatgtgcacgactcgaacatccgagtgaaatgttctgacgttggaatgtct

SEQ ID NO: 14952 - DNA, 386 bp, Glycine max
gcttagccctagaggggatggaccttttcaggtttttgagaggatcaatatctttgcctataggttggacctcccagaagagtatggagtcagcaccacttttaacatttctgatttaattccttttgcaaatggagctgatattgaggacgaagaactaacagatttgaggtcaaatcctcttcaaggggaaggggatgatgcaatcctccctaggaagggaccagtcactagagccatgagcaagaggctccaagaggattgggctaaagctgctgaagaaggccctagggttctcatgaacctcagggtagatttctgagtccatgggccaacgttgggtccaattatctttgtacatattagactaggatgtcattatattt

SEQ ID NO: 14953 - DNA, 327 bp, Glycine max
  unsure at all n locations
ctgcagctatgggatgaatggcaattatcagcagatttctctctgcacttatggaggatgcaagtgtgacgttgggatcaaaatggagaaacaacgagaagaagagaaagttcatcaattcttgatgggtctagatgatgttttgtacggtacggtccgctctaaccttcttgcaactgatcccttgcctacattaaatagagtgtatgccactttggtgcaagaagaaagagtgagaaccatatctcggngaaaggaggaacgaggagaggctgttgggttctctgcacaggcccgtggaagaaccataggactcgctgaatcaaa

SEQ ID NO: 14954 - DNA, 352 bp, Glycine max
cctgattagcagccattggagttttttgcacttctaacttatcaactattgtggtgaattaatgtttcttatggattcctaaggtattctcctcttattgagccgggaatcaggactagtattcagcggatacgtcatcagtttgataagatgtgttatatatttatagaatgcggaaaaataaatgatgtaagagattacgtcaaccgtatagaattttttttatatatattctcctaatgaatagtcaaatatttactttttactccatagataaaacttagatagtaacacacaccgtggttttattcgatcccataaaatacacacccttgaaaaggagtgattatgg

SEQ ID NO: 14955 - DNA, 383 bp, Glycine max
  unsure at all n locations
tatgaagaaagatgatgttatgattntaaccctttcacattatttttagaagtttaattattttgatgtgaaacatgtttctactccttatgactcattcattaagttaaagaaaaatttgagtaaatgaattttttcacataaatattctcaaattattggttctttgtcacatttgacaaacttctctaggcctgacattgcatatgcaattgatagattagaaagtaattgagggatttagtgatgcaaattggatttctgattctgatgaaataaaatcgacaagtggttatgtctctactttagctggcggtgtagtatcatggaaatctgttaaacaaactattatttcacgttctaccatagaagcaanaactatt

SEQ ID NO: 14956 - DNA, 394 bp, Glycine max
  unsure at all n locations
gcttgtgcaaagatagagatgatacacaaagagattttatttttcattntatatgttnggtgaatggaaaggtttgttctctaatcattgatggtggaagttgtaccaatgttgcaagcactaaattagtggagaagcttggttaaaaaccacccctcaccctaagccttataagttgcaatggttgagtgacaatggtgagttggttgtggataagcaagtgttacttacattctccattggaaagtatgttgatgaagtgctttgtgatatggttcccatagaagtcggacatgtgttacttgggagaccttggcaatatgatagagatgttgtccataatggggtcaccaatcgatattctttcttgaataaaggtaaaaagttagttctc

SEQ ID NO: 14957 - DNA, 356 bp, Glycine max
  unsure at all n locations
aacaacggctcacaaatggtggagagctgcgatatgaatctggcaatataattcaagcgtcccaggaaacctcggacttgcctgtctgtacggagttctggcatctcaaggatagccttcaccttttcggagtctacctctatccctttctggcttacaatgaaaccaagcaatttccctgattcgaccccaaaggtacacttagcggggttcaaccttaattgatatttattaagcctttcgaacaacttccgcacgatgacaaggtgttcttactcagatttagatttagcaattacgtcgtccacgtagacctcgatctcttgatgcatcatatcatggaacanagctaccat

SEQ ID NO: 14958 - DNA, 356 bp, Glycine max
  unsure at all n locations
tcaacatcagaccacttttagggtgctggaactatttcacatggtcttgatggggcctatgcaagttgaaagccttggaggaaagaggtatgcctatgttgttgtggatgatttctccagatttacctgngtcaactttatcagagagaaatcagacacctttgaagtattcaaggagttgagtctaagacttcaaagagaaaaagactgtgtcatcaagagaatcaggagtgaccatggcagagagtttgaaaacagcaagtttactgaattctgcacatctgaaggcatcactcatgagttctctgcagccattacaccacaacaaaatggcatagttgaaaggaaaaacagga

SEQ ID NO: 14959 - DNA, 417 bp, Glycine max
  unsure at all n locations
angctgcagctatgctganacattacaatagatttcctcattctattatcaaaatcaaccacagcagaaaaattatgacctctccagcaatagatacaaccctggatgaaggaatcaccctaatctcagatggtttagccctcaacagcaacaacagcagcctgctccttccttccaaaatgttgttggcccaagcagaccatacattcctccaccaatccaacaacaatagccccagaaatagccaacagttgagaccgctccacaaccttccctagaagaacttgtgaggcatatgatgatgcagaacatgcagtttcaacaagagaccagagcctccattcagagcttagccaattagatgggacaattagctacacaatngaatcaacaacagtcctagaattccgacaagct

SEQ ID NO: 14960 - DNA, 417 bp, Glycine max
  unsure at all n locations
atccttagagtcacctgangctgcagctatgctganatattacaatatttctcctctttctcagcagcaaaatcaaccacagcagaacaattatgacctctccagcaacagatacaaccctggatggaggaatcaccctaacctcagatggtccagccctcagcaacaacaacagcagcctgctccttccttccaaaatgctgctggcccaagcagaccatacattcctccaccaatccaacaacagcaacaacctcaaaaacagccaacagttaaggcccctccacaaccttccctcgaagaacttgtgaggcanatgactatgcagaacatgcatggaataaatgatgtgagttatggaatggaatttttatttgatggagaatctattattnggaattgtggaaaaatgttatg

SEQ ID NO: 14961 - DNA, 371 bp, Glycine max
tcaatataaagatggcctcagcaaactccttattttcagaagggaattctatcaatagacctccaatctttaatggagagggttaccactactggaaaacccgaatgcaaaattttattgaggcaatagacctaaatatttaggaagccatagaaatagggccttatatacccaccacagtagaaagagttacaatagatggcagttcatcaagtgaaagtataacaatagaaaaacctagagatagatggtctgaagaggatagaaaacgagtacaatacaatttaaaagccaaaaacataataacatctgccctgggaatggatgaatatttcagggtttcaaattgtaagagtgctaaggaaatgtgg

SEQ ID NO: 14962 - DNA, 323 bp, Glycine max
  unsure at all n locations
tgacatctgatgtgtggacatcttgtacttcttatgttatatttcattaactgcgcattatgttgatgcaaattggaagttgaatggtaaaatggntaatttttctcattttcctcctccacactcggggcgtgagatggctaaagttatatatggntttttttggaagaatggtggattgagcacaaaatattttcattaattctagatgatgcttcttccaatgataaaatgcaagactatttgaaggaaagacttttgcatactaatggtttagtaagtggtggtgaattttttcatatctgatgttgtgctcacatttt

SEQ ID NO: 14963 - DNA, 370 bp, Glycine max
  unsure at all n locations
ntgagtaaattcaaacgacattagctnnntacttgtatgnctaanagagngcccgaantatattcaggacgcttaaaaatggatggtgaaacttttaacccattcaaaccaacataactttttacctggaagaatggatgaagtccggaatataacgagacgcctcgaaatgaatgttgaagctctgagcccattcaaacgacaataactttttactcggatgtctgattgagttccgtcatatatcgagacgctcgaaattgaatgttgaagcacttagccaattcaaacgacaataactttttactcagatgtctgattgagtgccgtaatatatcgagacgctcgaaattgaatgttgaacctatga

SEQ ID NO: 14964 - DNA, 379 bp, Glycine max
tcagtgacaccgacatttctgcagtgccaccttgttggaaaggccaatgtcaatcaggggagggattcaattcctcatcatgcaacaggtttaaggctgaaaccttatcctcatctagtttcatattcacttcacagaccaaacatgacgtcttcaacatggttttgtcatcttcaatggctaacaattttgtggataataatataggaaagtgataggagcaagatactacaggagtggatatgaagctgctgagggagattcagatgcaaaaaagtccttcagatctgcaagggacagcactggccatgggagccacacagcctccatagcagcagggaggtttgtggcaaacatgaactacaaggggctggcaagt

SEQ ID NO: 14965 - DNA, 372 bp, Glycine max
tgcttttacaaaagcatgcaaaatgggtagagttcatagagcaatttccatatgttatcaaatacaaaaagggaaaaacaaatgtggtagctgatgccctctctaggtgacaaacattgttttgctccctaggagctcaaattttaggatttgataacattaaggacttgtatgctttagatgaatatttctctcccatttacgagagttgtgggaaaaaggcctaagatggattctatttggctgaggggtatttgtttaaagagggaaagctttgcataccccaaggatccattatgaaattacttgtgaaatagagccatgaggttgggctcatgggccactttgggataaacaagacccttgtcttac

SEQ ID NO: 14966 - DNA, 200 bp, Glycine max
  unsure at all n locations
gcttctcatatgttatgcgtctgaatcggacatgctattgtaaaattatgaccatctttattttccgagagcttccgtcggcaatntctagcatctcgatacgctatgtgcctgaatcggacatgcgagtgaaaacctatgaccatttgaatttctcgagagcttcccgtggtcaatttctagcgtctcgatacgctatg

SEQ ID NO: 14967 - DNA, 387 bp, Glycine max
  unsure at all n locations
acaatatttactaatagaattaatgagtttaatgttaatatgatattnttattttagatagaaataaagtattgttgtagcatgataaaatataaataaaatcaagatagagataaaaacaactttaaaaagaaaaaaaatcatgagtgatttaatttaataaattatgtgagctaacaattaatgtggttcgtatctactaattaatttatatataataataaattaaattataagatatgagttgagttgagttgggccgagttgaataaaataaaacctgttacccaactcttatntgatcgggtcttaattggtgtgggtcatgnttgacctgaagaacactctaaaaacttaatccaatataattagatcgnagtgagtcat

SEQ ID NO: 14968 - DNA, 267 bp, Glycine max
tcagatatcttaagaaaggagggtgaattaagatattgcaaactatctccccaattaaaattctatttcactttctattcaagttacaaattcccttaacaatgaactcttaaataatgattcaaatagaacaatctgaatataaatattaaataataataaataaaagaggtcaagggaagagaaagtgcaaactcggatatatactggttcggccacacccttgtgcctacgtccattcctcaagccgcttgagagttcactatc

SEQ ID NO: 14969 - DNA, 452 bp, Glycine max
  unsure at all n locations
gcttatctacccacacncctctattaactatattattcttcttgaaaataattacngataaaaataacacaacaaatataatcaaacatcaaacataattactaataatatatagatatatatcaaggtgttacaactctcccactcttttagaaatttcatcctcgaaatttacgttactcaaacaaggatggataagcttctcgcatttgactntctaattcccacatgacatcatctcctgatgcacctccccagatcaccttgaccaacagaatctctttccctcttaggtgttttgttggtcgtcataccctaatttcgtctagggaaccattcttgatggcatacaacctttgcttgaccgcttagaggtacttggcacccattngtgcacaatancgtgaagtttgaacatgccagaaatcaaaaggaagcattgtacacaatcc

SEQ ID NO: 14970 - DNA, 315 bp, Glycine max
  unsure at all n locations
cctcggatccctgtcagatacaatactagaaggaattccatgcaaccttactacttccttgatgtacaactccactagcttctccattctatacttcatattcactgggataaaatgagcagatttggtaagtcgatctactatgacccacacagcatcatgttcacgactagtcttgggtaaactagatacaaaatccatagagatgctctgccatttccacttcagaantttcaatggcttcaattctcccgatggtcggtgtgctcaacctagccttntacatgtaaacatcttgctacatatcagctacat

SEQ ID NO: 14971 - DNA, 398 bp, Glycine max
  unsure at all n locations
acaaactccttaaaacttggtaaataaattaaacgtgaaaataaaaaataaaaaatcaaagctactgatgcacacgttcaaacactcctccttgcatcaatagggccaaattctaagtctttctcttaaatcttcaaatctgctttttgcaagagactntgtgaatatgnttgctagttgatcttcagttctgcaatactctagtctatctacaccatctntctgaacatctctgatggagagtagtttgatgctaacatgnttggtcttgccatgaaaaactagattggttgagatagctatagccacttgattatcaaccatgactttggtactcattntntgctctaagtgcagatcatttaanannattctcaaccatacagcattattaacat

SEQ ID NO: 14972 - DNA, 400 bp, Glycine max
  unsure at all n locations
gcttagtgacatccgtgacttgatcttgagttaagatgttcgcaagttagatnctttagaatcttccagtcgtgtttcctattcagcattgaatactgaaggcaggggaaggactacccagaagggtcagaatggtcgaggcctatcatagtcaagagggaaaggtcacagaaaatttcaaagtgacgatacttgttggaattgtgacaagagaggtcactttagcaatcagtgcaaggcaccaaagaagaacaagtcgcacaaaaataaaaagcgcgatgatgatgaatccgctaatgcagcaactgatgaactagatgatgcattaatttgcacgttggatagtcctgttgagtcatggatcatggactcangtgcgtcgttccacactactccctct

SEQ ID NO: 14973 - DNA, 351 bp, Glycine max
  unsure at all n locations
agcttctatctttcttatctaaaagtattatttctacctctagagngttngaacttttacatttaaatatntttggtccttctagaaccatatgcattagagggaatcactatgctttgattattgtagatgattgctctagatatatctagactttattctatcttctttgagtaatgcttttaaagtctttcaaaaacttgccaagcttattcaaaatgaaaaggaattcaaaattaaaagtttgagaagtgaccacggaagagaatttcaaaatgactctgaattgttttgtgaacaaaatggcattaatcgtaacttttccgctccaagaacaccacaacataatgg

SEQ ID NO: 14974 - DNA, 402 bp, Glycine max
  unsure at all n locations
agcttgttccctccttgttctaagggctnggttactgtgaaaacagtcttattctgtggcacaagaaccagcttgatcttccaccacagaataactccaaagctgcctccaccacctcctcttatagcccaaaatagatcctctctcatggcttttctatcaagaaccctccctttagcatcaacaattctagcatctataacattgtcagcaccaaggccatactttctcatcatggaaccatatgcacctcctgtgatgtgccctccaatccccaaggttgtgcaaaggcctgcaaggaagccatgaactgcactcttctctgaaatcctgtagtaaactccaccaatagtggcaccggcttggatccaagccgtgtttcgcgcaatatcaacattcact

SEQ ID NO: 14975 - DNA, 456 bp, Glycine max
  unsure at all n locations
gagcgttggangttttctgtgccaatacgcttcttctttttccagncttcttctggcttcaattcatcagtgggctttccttctgtgtccagcatcttgggatgctcccagcctttgatgacagctttccaggttctgctatccagtgatttgaggaaggccaccattcttgctttccagtattcataggtgcttacatcaagaataggtggtctgctcactggtcctccttctttctccatgttcatcacaatttatctgcccagatctcactctgtgattacgagtgtttgctctgataccaattgaaattctgataccagaggacagatagccgacccgacgtcacgacatcacgcttcagaacatgcagttgatgtgcgtccgtatgaacagattanacaagtaatatcacaagagaattgttacccaggtcggagcaccttacctacatgt

SEQ ID NO: 14976 - DNA, 414 bp, Glycine max
  unsure at all n locations
agcttatgcagcanatatatactatagaccttctcaacctcagcagcaaaatcaaccacagcagagcaattatgacctttccagcaacagatacaaccctggatggaggaatcaccctaacctcagatggtccagccctcagcaacaacaacagcagcctgctccttccttccaaaatgctgctggcccaagcaaaccatacattcctccaccaatccaacaacagcaacaaccccagaaacagccaatagttgaggcccctccacaaccttccctcgaagaacttgtgaggcaaatgactatgcagaacatgcagtttcagcaagagaccagagcctncattcagagcttaaccaatcagatgggacaattggctacccaattgaatcaacaacagtcccagaattctgacaa

SEQ ID NO: 14977 - DNA, 392 bp, Glycine max
agcttatgagatgctggaagagtctaagaattttctgagataaaatcttctaccttagcttccaacaagctacgtaattgatatggaatattacaaagattcacaacaaaatcactattagaaaataatgttttaacatcagttattaaggactctcaacatcagttattgacattgaaagtaatactgttaacatcggttttccaaaaccgatgttatcataaaatgacaacatcggttttttaaataaccaatgttagatattaagaattatataaaaaaaagtcatatatcttcatatcaacatcggtgtttaccagaaccgatgttaacttattcatacaacaatcggttttaaatcaaaccgatgtaatatatacatacaacattga

SEQ ID NO: 14978 - DNA, 353 bp, Glycine max
  unsure at all n locations
ctacctcatgctctcctctaatgactatggcatcatttctggcactaaactgctgngagttggaggccatcttctcaattaaatttctggcttcagcaggagtcatgtctccaagggctccaccactggcagcatctatcatacttctctccatattactgagtccttcataaaagtattggagaagaagctgttctgaaatctgatggtgggggcaactggcacatagtttcttaaatctctcccagtactcatacaagctctctccactgagttgtctaatacctgagatatccttcctaatggctgtggtcctggaagcagggaaaaatttttctaagaatactctctta

SEQ ID NO: 14979 - DNA, 147 bp, Glycine max
agggaagctctcgagttactcaaatgatcatatcttattttcagagggtcgattcacgcgcttaatatttcgagacgctcgaaaatgaacaacgaatgctctcgaggaattcaaatgttcatatcttgtcacactgatgtcccattc

SEQ ID NO: 14980 - DNA, 394 bp, Glycine max
  unsure at all n locations
agcttgtagcanatgcaaacggcaataacgttttactcggatgttcgattgagtcacgtaatacatcgaaacgctcgaaattgaaaacagaagctctgtgcaaattcaaacgacaatacattttaactcggatgtccgattgagtcccgtaatatatcaagacactcgaaattgagaataaaagctctgaacaaattcaaacgacaataactttttactcggatgtccgattgagtccagtaatatatctagacactcgaaattgagaatagaagagctgagcaaattcaaacgacaataactttntactcggatgtccgatggagtcccgagcgtctcgatatattatgcgcctaaactggacatccgagataatagttatgactattttaat

SEQ ID NO: 14981 - DNA, 297 bp, Glycine max
agctattctctcttatgtccgatttcggagtatattagatcgagacactcgacattgagcaacgttagctcttgagaaattgaaatggtcataactctccacacggatgtctgactcagacgcattatataatctagatgctcgaaattgaaccactgaagctctctagacactcaaatatccataacttttcactcgtggggccgaatcttgcgcatataatatcagacggtcgaatttgacctccaatctgcttgagaaatactaacgggcctaactctcctacccggattatcg

SEQ ID NO: 14982 - DNA, 414 bp, Glycine max
  unsure at all n locations
gcttcagctntgtccacaaggcttcatgttttctcgtccaaaatcgctaattgaacctcggatccctgtctgatacaatactagaaggaattccatgcaaccttactacttccttgatgtacaactccacgagtttctccattctatacttcatattcaccggaataaaatgagcagatttggtgagtcgatctactatgacccacacagcatcatgcccactgctagtcttgggtagactagatacaaaatccatagatatgctctcccatttccattccggaatttccaatggcttcaattctcctgatggtcgctggtgctcaaccttagccctttgacatgtcaaacatcttgctacatattcagctacatctttcttcatgccatgccaccaaaaacttctcttcaaat

SEQ ID NO: 14983 - DNA, 364 bp, Glycine max
  unsure at all n locations
agcttgtaaggtagtcatacctcacaaaatatatgtatgtgtgtttaggtagcaagataccttggatatgcatgtatataacanacatacctcacanaatatatatatgtatgtttaggtagcaagataccttggatatgcatgtatatagcanaaatatctcacaaaacatatatatgtatgtttaggtagcaagataccttggatatgcatgtatatagcanaaatatctcacaacatatatatatgtatgtttaggtagcaagataccttgcacacacatgtatatagcaaaacacctcacaaaaatatacatatgtttaggtagcaaatacccttgtggaaagagaaagagatataaaag

SEQ ID NO: 14984 - DNA, 314 bp, Glycine max
  unsure at all n locations
aacaacagcagctgctccttcctccaaatgctgctggcccaagcaaaccatacattcctncaccaatccaacaacagcaacaaccccagaaacagccaatagttgaggcccctccacaaccttccctcgaagaactngtgaggcaaatgactatgcagaacatgcagtttcagcaagagaccagagcctncattcagagcttaaccaatcagatgggacaattggctacccaatngaatcaacaacagtcccagaattctgacaagctgccttctcaagctgtccaaaatcccaaaaatgtagtgccatttcat

SEQ ID NO: 14985 - DNA, 467 bp, Glycine max
  unsure at all n locations
gcttctggtgggacatcttgacttgctntcttatctgacattcaccacaaattctgccttcttctattttcagattgggaatgcctctaacagcacctttgtcaatgattntcttcatgcctcttaagtgcagatgtccaaatctttgatgccatattctgacttcatcttctttggaggatagacatgtggaggagtaactggtttcttgaggtgtccataggtagcagntgtcctttgatctgctgcccttcattagaacttcactcttctcatttgtcaccaaacattctgactntgtgaagtttacattgaatccttcatcacacagctgactgatgctgatcaagtntgcagtcagtcccttcaccagcagtactttgtccagactaggaagtccatcatggactagctttcccattccaatgatctttcctttagagccatctccaaatgtcacatagcta

SEQ ID NO: 14986 - DNA, 329 bp, Glycine max
tgggtatttgacgaattacggtttatgtgtactcaacttttttgttttagtgttacttgaccaattagggtttagggttatttgacatattacggtcacttgactaattacggtttaaggttatttgacaaattagggttacttgactaattatgatttatgcgtgtataactaattagggttatgaatacttgacttattagggtttagttttacttgaccaattatggtttacggttattttacaacatttggtttatggctacatgactaaatagggtttagcgatatttgatagataagggtttaggtttacttgactagttggg

SEQ ID NO: 14987 - DNA, 367 bp, Glycine max
  unsure at all n locations
caagcttgatttcctttgttccgganaccttttttttcttatgtgcacccaaacccaatctccgggttcgaagacaaccttctttctccctttgttggcttgtttagcatagcttttatttttcctcttaatttgatctttgactctctcatgaagcttcttcacatagtccgcctttgcttgaccttctttatgcttaanaacagatacattaggcataggcaaaagatcaagaggagttagtgggttaaaaccatcaacagcttcaaaaggagaacaattagtggtgctatgaacagctctattgtaagcatattcaacatggggtaaacaagcttcccaagtttttaagttcttcctcaaaact

SEQ ID NO: 14988 - DNA, 373 bp, Glycine max
  unsure at all n locations
ggatanntaatgggagcattttttttttttttaaggaaagatggacgaccactttagtgctggttttgcctaacccgagagaaccatttgaggtgtattgtgatgcatcaaagatgggtttaggtggagtgttgatgcagaatggccaagtggtggcctatgcttctagacaacttaagactcatgagaggaattatcccacccatgatctagagttggctggctgtagttttgcccttaagatttggaggcattatctgtttggctctaagttcgaggtgtttagtgatcataagagccttaaatatttgtttagtcagaaggagctgaacatgagacanaggagatgtgttagagttcttaaggattatga

SEQ ID NO: 14989 - DNA, 336 bp, Glycine max
gtaaacattcaactttgagcgtctcgatatattacgggactctattatacatccgagtaaaaagttattggcgtttgaattggctcacacgttcaaaattcaatttctagcgctctcgatatattctaggactcaatcagacatccgagtaaaaagttattgtcgctagaattggctgagaggttcaacactcaatttcgagcgtcccgatatattacggcactgaattggacatccgagtgaaaagttattgtcgtttgaatttgctccgagcttcaacattcaatttcgagcgtctcgatatattacgggactcaatcagacatccgagtaaaa

SEQ ID NO: 14990 - DNA, 436 bp, Glycine max
  unsure at all n locations
agctntaagccaattcatacgacaataactttttacttttatgtctgantgagtcccgtaatatatcgagacgctcaaagttgaatgtttaatctttaagccaattcatacgacaataactttttactcggatgtctgattgagtcccgtaatataacgaaacgctcgaaattgaatgtttaagctttgagccaattctaacgataataactttttactcggatgtccgattgagtctcgtaatatatcgacacgctcgaaattgaatggtgaagctctgagcctattcaaacaacaataactttttactcggatgtccgattgagtgacgtaatatatcgggaccgctcgaaatgaatgttgaacctctgagccaactcaaacgacaataactttntactcggatgtctgattgagtcccgtaatatatcgagac

SEQ ID NO: 14991 - DNA, 428 bp, Glycine max
  unsure at all n locations
agcttttaatgaacggaatatctaagnctaatcttatattgcttgtaccgcacgcaaatatttcatgttatcatatatggtaatatttgatccatatatattgatttttaactacttaatttgcagtctgtacaccttactttagcttatgcatcaacgttttcccgtgaatgtataagaatcacaacaaatgagacaagggccactttaaagtccaaatagtccaagtaagagcttttggctaacaaaaagattttaaatttttttatagtactaatnnaccnaaanaagatgattgcaaaattatatctacaaataaattttaattaaaatatataaataacatcttatcttttatgtatatcgtaaataacaatgtaattataataagacaataataactttaatcaagttatttataactaaat

SEQ ID NO: 14992 - DNA, 215 bp, Glycine max
  unsure at all n locations
catccttgctttccagtattcatagttggttccatcaagaattggtggtctgttcactggtcctccttctttctccatgttcatcagaatttatctccctaggtctcactcagtgatttcgagtgcctgctctgataccaattgaaattctgatatggnggacagatgtcgtaccggatgtcacgacatcacgcttcagaacatgccagatatat

SEQ ID NO: 14993 - DNA, 424 bp, Glycine max
gtacaaatagaatcatcttgatatgactgttttggaagttctcttactaggctatgcttttgaagctttgagattaacctccagctagcatggtcaaacttcttattccatacccagtaatgctctttgactaaaagtaagcatgacaccttttgattggatagatcaccaagtttaatcttatagtgatttccttgtctcttagtagacaagagtaaagagttgtccttgttttggatgatacacatatccttgttaaagttaaaggtgacattgtatccactatcatacaattgacttatgctcaacaaattatgcttcaatcctttaacaagtaaaacattattgatagaaggataataaggaatacaaaccttacctacacctattattagacctttctgattccctctgaaagtgacca

SEQ ID NO: 14994 - DNA, 438 bp, Glycine max
  unsure at all n locations
agcttcttagtctcagatgatgcagctgagtttgtatctatctcatgcactcctctaatgactatagcatcatttctggcgctaaactgctgggagttggaagccatcttctcaattaaatttctggctttagcaggagtcatgtctccaagggctccaccactggcagcatctatcatacttctctccatattactgagtccttcataaaaatattggagaagaagctgctccgaaatctgatggtgagggcaactggcacatagttnttaaatcgctcccagtactcatacaggctctctccactgagttgtctaatacctgagatatctttcctgatggctgtggtcctggaagcagggaaattnttttctaagaatactctcttaaggtcatcccagctcgtgatggaccttggagcaaggtaatacagctagt

SEQ ID NO: 14995 - DNA, 431 bp, Glycine max
  unsure at all n locations
agcttcctcaattnttatggattgatgctcttatgactatcttcgnatatattaaaccgagttccaaccaaggctgtctcaaagacacattttgagttattcaagggttggataccaagtttgcgacatatacgcgtttggggatgcccgtctgaagtaagaatttataatccacaagagaagaaactagaccctaagactattactggntatttcattggatatgctgaaatgtctaaagggtataggttctattgtccatcccacaacactaggattgtgaaatcaaggaatgcaaagtttcttgaanatgacttgatcagtgggagtgatcaatttcaaaacatttcttctgaaagggatcactatgaagctgaaccttctgggacangtaataggtngtagtcattctcacccctcaagtaaaatgg

SEQ ID NO: 14996 - DNA, 300 bp, Glycine max
cagttgtacgtgtatttgaaggagtagagagggatgcagtgctatgagaggaaagcaaagtaggcattccaagggtcattgacgagcgtgatgggaaggaggcagtgaatggcaaagataagggttggggacgcacgaaaggtgtgtttagaggagatgaatttgttttttaaaaaggtggaaagagggcatctgatgttgttgaaggggtctgtgtggatgtaaatgttgaggaggttgggaggggtggaagagaagaatttgtcccataagggggagaattatatatcagtgtgggtg

SEQ ID NO: 14997 - DNA, 391 bp, Glycine max
  unsure at all n locations
tctatagaaggttcggtcctaatttctctacaattgcgtttcctctcaatgagctggngaagaagaatgtggcatttacctggggtgaaaaacaagagcaagcctttgctttgctcatagaaaagcttactaaggcacttgttctagctcttcctgacttttctaaaacttttgagctagaatgagatgcctctggagagggagttggagctgtattgttacaaagtgggcaccctattgcttattttagtgaaaaacttcatagtgccaccctcaactaccccacctatgataaagagctttatgccttaataagagccctccaaacttgggaacattacctctgttacaaggaatttgtcattcatagtgatcatcaatcacttaagta

SEQ ID NO: 14998 - DNA, 313 bp, Glycine max
tgggggcaaagaaattttcttcccatcaaaccctggatgcaactatgatcgtatacccatatcagctacatcttgacgggtattcaagccatcctttgtcttgccttgaatgttaaggaacgtcccaatgacactatcacagacatttttctccacatgcataacatcaatacaatgtctaacgtcaagatcacaccagtacggaagatcaaagaaaatggacctcttcttccatatgcaactttgacttttatccttcttttgggtcttcccaaatacagtattcatgtgttcaacccgctgatatacctac

SEQ ID NO: 14999 - DNA, 398 bp, Glycine max
  unsure at all n locations
tagtgcagggtttaanaaatccctttatgctctgctctgggatggcgcaaatcatatagtctcaaatcccaaacttccacaagataacatgcctttcaaccgttgctgctattacctctttttgttatgcattaattggaagcgggctttctctggcaagagttgtatcacgtatgagcttcacctatatctttccaaaagctgtccatcattcattccagaaaatatatgctacatttttttatcagcaaatgttagtttgttagaatgttaattttgttagcagagggattgaacatgtaacctttcttctttttccttctcctttaaccatccagcccactatatatctgttacaattttatactagatatttcctaagtcacttcattagctta

SEQ ID NO: 15000 - DNA, 328 bp, Glycine max
  unsure at all n locations
agctnntatctttagatctttaagtgcagattttcatgantatgatagatctcatccagcgcaagttgttgcagcccagatacgcacactgctatataaacatgaaggctgcacgagttttctaccaagtccgggattgaagagttattttgtgagttttgggacttgagtgttttgtgagccaccttgatgttaccctaacatcaagtgttggacctgagtgtgtagagttgatctctaatgttcagagagcaatctctggtgtgtctttgatttaattgtaaacaccggagagtgattgagagggagtgagaggggttctcatatc

SEQ ID NO: 15001 - DNA, 446 bp, Glycine max
ctcagctttaggccttggatcttcttcatcaatggagacctttgcttcctgaatatctatggaagcagaatggagaaggaagaaagatgattggagacgccacttcaaggagaagatgagtcaaaaagaagctcaccaccataggaagccatggataagagcttgaaggtaggagaagatgagtggagggagagggagataaattttatgcctcaaaagaggtttgaaatttgaagtttaattctcaaatgatcaaagttgaaaaaatgcacacacgtgtcctctatttatagcctaagtgtcacacaaaattggaggaaaatttgaatttttattcaaatttcacttgaatttgaaattgaatttgtggagccaaaatttcactaattatgattagggaattttagctatgggtcaccccactaatccaggatcaagtctaagat

SEQ ID NO: 15002 - DNA, 424 bp, Glycine max
  unsure at all n locations
gggaacaagaatctaaaccttgttcttagtgaactgactcaattcttcctccattgttgngacccaagaatcttcactcaatgcttcattaatgtttttaggctcaatggatgagagaagatccatcattcctctttttttattcaaggatgctcttgttttgactccagaagatgtttctccaatgattagatttggaggatgtgaatagacaaacctcatatctctaggcatgttagcttctattttttgtccaaagctttgtctttctgaactctccctttttgagctatcttgtaaagatcttcttaattnttctttgggccatctangctacgtgtagtgttctgagtatgcctgatgatccttattcttttctagttcttctaaatctgcaatccttctcttctcaagtgtactatca

SEQ ID NO: 15003 - DNA, 421 bp, Glycine max
ctcagcttccagaataagatcagattcagactcagattattattcagagaagattaattaagataagtataaaaaagttttttcaaaaactgagtagcacatggatttttctcaaaaccattttaccaaagagtttttactctctagtaatcgattactagattattgtaatcgattaccagtagtaaaatggatttgaaaaagtttacaacgttccaattgatttcaaaatgttgtaatcgattacaatgttttggtaatcgattaccagtgtgcttgaatgttgaaattcaaattcaaatgtgaagagtcacatcctttcacaaaaaagctttatgtaatcgattacactgatttggtaatcgattaccagtgatagtttctgaacaaatcaaaagatgtaactcttcaaatagttttt

SEQ ID NO: 15004 - DNA, 471 bp, Glycine max
  unsure at all n locations
agcttatattatataataacaaanaatgaaatttatatcattatttaccttcatcatctgaaaccatntcattcattacattagcacattcagcaacaactttatagcttgtagaacctataaaaatacattactagtattagttcttgaataaacacaaatatcaatttaacaacatatatgaataaaactttacccgtattttcagcactccacaacaaacttctagcgcacattaaagcctctaaagtagtccattgaagtctactacgatgtgggcttaatacttgaccaccagtgctaaatgcagattctgaagctacggtagatactggaatagctaatatatccttagcaattgcttgaagtggtggatacttgacaccattaaacttccaccacatcanaatatcaaagtcaacagctcttggaaaacatcttcttctaatagtagctaactctgattaacat

SEQ ID NO: 15005 - DNA, 373 bp, Glycine max
  unsure at all n locations
gacctatgaaactcagctataattatcgatacgctcaaaataacatcgaanactctcgttatatcaaatagncataactattcacacggatgtccgattcgggcgcataatatgtcgagaggatcgaaattgaacaacggaagctcttgagaaattcaactggtctaacctttcacacggatggtcgaatcaggcgcaatacatatcgagaccctctaaaattaacaaccgaagctcttgagaaattcaaatggtcataacatttcactcgaatgtcccatttcggcgcatcacatatagagacactcgaaaatgaacaacggaaactctcgtgaaattcaaatggtcataacttttcacactgaagtcccat

SEQ ID NO: 15006 - DNA, 430 bp, Glycine max
ggtgcattcaataccctgatgaggatgtcccatatgttcttataactagactgatacacttgttgtccaagtttcatggttttgcaggtgaagaccctcataagcatctaaaagaattccatattgtctgctccaccatgaaacctccagacgtccaagaaggtcacatctttctgaaagcctttcctcattctttatagggagtggcaaaggactggctatattaccttgctctaaggtccatcacgagctgggatgacctcaaaagagtattcttagaataaattttccctgcctccaggaccacgaccatcagaaaggatatttcaggcattacgcaacttagtggagagagcttatatgaatactgggagagatttaaaaaactatgcgccagttgccctcaccaccagatttctgagcagcttct

SEQ ID NO: 15007 - DNA, 326 bp, Glycine max
cttccatggcttattccctaatggatgacacttcctctcacctcttgtcctttgtctttcgctgcatctccatggtgggaaatcaccattgaaggacctcattgaagctcaaagatccatccttcataaaagctccacaagcaagcttacatcatatggtatagcaaaacaaagaaattgaactcttaaggatatggtgagaagaatgattagtcattcttctttgccagagtcactttggggagaagccttaaagaccgcattttacatccttaatagtgtgctaggtaaagcagctaacaaacacccttatgaactttggactg

SEQ ID NO: 15008 - DNA, 428 bp, Glycine max
  unsure at all n locations
tctctttgatgaaatgtctatcaatctccacatgctttgttcaatcatgttggacaggattgtgaacaattgctatggccgacatattgtcacagtacaaactcatagtttcatttggtttaaaacccaaatctgatagtacatttttaacccacaaaagttcacatacatcgagtgtcatgcctatgaattctgcttcagcactagatcttgttactacggtctgttttttattcctccaagttacaagatttcctcctacaaaagtaaagtatccagaggtagatcttctatcatcttttgaacctgcctaatctgcatccgtgtacccttctaccttcaagtttccatgatttgagaacaaaattcctttntcaggagtggacttcaaatatctcanaattctctcgactgcatccatatgaagc

SEQ ID NO: 15009 - DNA, 408 bp, Glycine max
ttatagcaattcagatggtcataacgtctcactcggatttcggattcaagcgcataatatatcgagacgctcgaaattgaataatggaagctattgagcaattccaatggtcataacttttaactcggaagtccgattgaggcacataatatattgagacgctcgaaattgaacaacggaagctctcgagaaattcaaatggtcataacttttaactcggaggtcggattgagacgcataatatatctagacgctcgaaattgaacaatggaagctcttgagcaattccaaaggccataacttttaactcggaggtacgattcaggcgcataatatctctatacgttcgaaattgaacaacggaagctctcgagcaactctaatgtgcataacttttcactcggaggt

SEQ ID NO: 15010 - DNA, 407 bp, Glycine max
agcttctgttttcaattacgagcgtctccatatattattggcctcaatccgacatcggagtaaaaagttattgtcgttagaatttgctcagagcttctgttctgaattttgagagtctcgatatactacggaacacaatcggacatctcagtaaaaagttattgtcgcttgaatttgctcagagcttctgttcttaattacgagagtctcgatatattacgggattcattcggacatccaagtaaaaagttattgccgtttgaatttgctcaaagcattcgttgtcaattacgagcgtctagatatattacgggattcattcggacatccgagtaaaaagttatcgtctttttattttgctcagagcttctgtttcaatctcgagcatcttgatatattacaggact

SEQ ID NO: 15011 - DNA, 446 bp, Glycine max
  unsure at all n locations
agctnttacgatggcgctactcttcttcttttattgtgagagaagcccacactatgctacaaacactatcaaagaagatcaaatagagatacatgatataaatggaagaagtgaaatagatagattaaatggagaattctatagacaatatgtactggacggttacattttgtttgtttattgttcatagtgtagtttccttcacctttctggcctttacattgttgtctagtttagtttgtctgtgatagcctgattgtaaataatattgtttttaacttcttggctgtcaggatttccaatccttggagttgagtggcagaagatggaaaatcctgatttacgaatgtcaatgggcatgggaccagatcaaaaaggtgtgcgtatcagaagaattgaacccactgctccagaatctcatgttctgaagccatctgatgtaattc

SEQ ID NO: 15012 - DNA, 391 bp, Glycine max
  unsure at all n locations
tggcattgatagagtacaaatattatgaaaccgacggattggcagatgcttcaactaaaactaaaactttggagtatctgattagagctgatgctagtaaagtgaacaactttaggattctggaggaggagggcatgcatatgtcgaccaacacgaggatgaaagcttcaaatttgcttatgcaactgatctcatgtggctcaatattagtgaaaaaccatagttttggccttattccttcctataagcccatgttttatagttcaaaatgtcctttcttttgtgttgggggagtttgattgcttattgattgagcatttgtagtttaatatttttctattctttctatctcaattgacatctctttgactgttattttntcaccttaact

SEQ ID NO: 15013 - DNA, 442 bp, Glycine max
  unsure at all n locations
agcttcaagaaacattttcactgttgttgtttatcttaacttcactagttagctctgctacacataatggctngtctagtgcaattactgctgctagtaaaagtcctaatgtagtttctaattctgtaatttcatcccctagcaatgttagcttgtggcatgctaggctgggtcaccctaatagcccatgtcatgaagctagtcaatcattgtaacatttcctcatctaataaaaatttccagacttttgctcctcatgctatatgggaaattctcacagatttccttctcactcttttatttttgtatactctcctttggagcttttttttatagacttgtgggggccttctcatttaatttcctatgctggtttcaaatactatgtcatttattgatgttttttccagatacacttgtgtatttcctaataaaaactaaa

SEQ ID NO: 15014 - DNA, 437 bp, Glycine max
aactagctcttgagaaacttcttggaagcagagcttatttctctattccctctcataactaagctcacctccttgagaagcttccataagaagattcctaaagaagctagagcttagctacacacacctctctaatagctaagttcacctccttgagatgagaagctagagcttagctacataccctctataatagctaaactcacccatatggccaaaaacatgaaaatacaaaaaaaggtcctactacaaagactactcaaaatgctctgaaatacaaggctaaaaccctatactactagaatggccaaaatacaaggcccaaacgaaggaaaaacctattctaatatttacaaagataagcgggctcatacatagcccatgggctcgaaatctaccctaaggctcatgagaaccctagggccttcccttggatc

SEQ ID NO: 15015 - DNA, 311 bp, Glycine max
acacggatgttcgattatggcgaatcacatatcgagacgctaaaaatggaacagcggaagctctcgagaaattcaaaggtcataacctctaacactgagttccgattcacgatcataatatataccgacgctcgaaattacacattggagggtctcgagaaaataaattggtaaatactttcacaccgatgtccgattcgggcgtataatatgtcgacacgctccaaattgaacaacagaagctctcgagatattccaatgcgcataacttctcacacggatctccaattcaggtgcatcgcatatcgaga

SEQ ID NO: 15016 - DNA, 197 bp, Glycine max
  unsure at all n locations
ctatatatatgtgacttgagacacgaatttgctaaaaagttttcagaacaaaaagggcttatcctcttaaaaagcaaaatcgttttatcctcttaccaattccttggccaaacacttgtgattcaataaggaattatttgagtgctcanattgttcaatctatctctttcaagagagatttcttcttctcttcttct

SEQ ID NO: 15017 - DNA, 217 bp, Glycine max
tcatgaaactcagctccaaactcgaacgcggaggacacatgaacagccctcagcaagaacattcatgtggctccagaataggatgagaatggaggattggcttgagggtcctctcttaggcaatcatgaaacacagcttcacactcaaaagtggaggacacatgaacagccctaagcataacattcatgtggctccggaaaggatgagaatggagga

SEQ ID NO: 15018 - DNA, 384 bp, Glycine max
  unsure at all n locations
catatatcgagacgctcgaaattgaatgttgaagctctgagccattcaacgacataacttttactcggatgtctggatgagtcccgtaatatatcgagaccctccaaattgaatgtgaagctctgagccaattcaaacgacaataacggtttactcggatgtctgattgagttccgcaatatatcgagaaccctcgaaatgaatgttgaagctccgagccaattcaaacgaacaataactnttactcggatgtctgattgagtcccgtaatatatcgagacgctcgaaattgaatggtgaacctctgagcctaatcaaacgacaataactatttactcggatgtctgattgagtcccgtcatatatcgagaacctcgaaattga

SEQ ID NO: 15019 - DNA, 398 bp, Glycine max
  unsure at all n locations
tcattaataaacacatcaaacttcacaggtgtgtttctctcaaactcaatcccttcaatcaccaaaacctcttcctcctcttccttctccttcctgctcctcgacttggttggccttttaaccattgtgctcacaactgaatccaacactagtgggaacttcacattccttgaagtctcagcagcacgtgctgcaccaaccaccaaaatttgtgctagtgcaaccttatgaaccctagaccttcgcggtgtgggcctagagtttaaccatggaatgtctacatcttggtaaacatacactagttntctctcgtcaagacaaatcttacccttactcgcacaaagttcttattctcatcgtagaagagaaacccagatttaaccaatccgagtcagtaa

SEQ ID NO: 15020 - DNA, 418 bp, Glycine max
  unsure at all n locations
tacccgctaacctagtggatggagggttgggctacatgcatgaaaaattangttaaatcttcattgttctcattgtaataaaaaaagaaaataaaaatgtgtttttttgtcaaaactgaggtggaataaagatgaatttttttcatgtttattcttgtcatcctgttagaagagtaaatagtatatgaaacaatagttattaactaattataactattaagtttgttaactttaataataattatattataagaaagtgtaaaaataatttctaattggctgatagtataacatttttttacactaacattatatacctattaaactctttntaaaaattacaaatgattntttaaaaaaaagtataattttataattaantatgatattctaatttgatatgttatttaaagatata

SEQ ID NO: 15021 - DNA, 468 bp, Glycine max
  unsure at all n locations
accctgatgaggatgtcccatatgttcttaatttttttctgattcattgcttccaaagnttcatggccttgcangtgaagacccacacaaacatttgaaagaaattcacattgtctgctccaccatgaaacccccagatgtccaagaggatcacatatttctgaaggcttttcctcattcattagagggagtggcaaaggactggctgtattaccttgctccaaggtccatcacgagctgggatgaccttaagagagtattcttagaaaatnttttccctgcttccaggaccacaaccatcangaaggatatctcaggtattagacaactcagtggagagagcctgaatgagtactgngagagaattaagaaactatgtgccagttgcccccaccatcagatttcagaacagcttattctccaatatntttatgaaggaactcagtatatggagagaagtatgataga

SEQ ID NO: 15022 - DNA, 251 bp, Glycine max
  unsure at all n locations
tttctctttntgataatatgattggacatgcttgtgagttcttcgttttccttctctctctttgataatttgattgatgtgtgagcaatgatggttaggaggggagaagaagtgtctgaattctgagctatggcatgcatgcacgggccccatggtgtccctaccaactgcagggactcatgtnggttacttccctcaaggtcataatgagcanngtttttgttanttgggtttactacctactctactct

SEQ ID NO: 15023 - DNA, 390 bp, Glycine max
  unsure at all n locations
gctcgtctcctgaacgcttgagaggttgatgtccaatggttaccctcnntatgtcctcaactngntngttaaatgctctggacgggtcggaccctgcctgacanattcacatacccggnntgtatcaaggcttgtggtgactngtctttgattgatgtgggcgttggaattcatgggcagacctttnaagttggctatgattccgacacattngttcaaaacactntgttggcaatgtatatgaatgccggngagaaggaagcagcacaactggttnttgacttgatgctggaacggactgtgatttcttggaataccatgattaacgggtacttttggaataactgtgtagaagatgcagtaaaggtttatggtagaatgatggatgtg

SEQ ID NO: 15024 - DNA, 444 bp, Glycine max
  unsure at all n locations
gactaattgtcttcacatttgattattgcttattatnaaananggngncatcagcgnagtggaatatgttgactggctctttgttttttcccacgaggaaactgctaaataagctcttatcaatgcttctctcattanaccgcgtaggccttctgaaacaatatngaatagtaaaggcgttaggtggtcgccttgtctaaggcctctttgtggaatgaatntatttgtggggctgccatttaccaatacagaaaccgaggctgagctaagacaaccctcaatccaacaaatccacttggggcagaagcctaatctcctcagcatatatgataggaaaccccacgagacggagttgtatgctctttcatagtctactntgaacaccaagcatggcttatgacgcctctntgcttcctccaccgcttcgatggctatcaatacact

SEQ ID NO: 15025 - DNA, 435 bp, Glycine max
  unsure at all n locations
tcctatctatatatcttttttatcttntcaggatctgataacttcttatcagacgttagttcatcattgaatttaacatggatggattcttctacaactaaagttcttgtactaaaaacttatatgctttagatgtattagataaaccaagaanaatcccttttgtcactttggaatcaaacttagcangttgatctttagtgttcatgataaagcactcacatccaaatggatgagaagtatgaaatatgggtcttcttcctctctatggttcatagggagactntnntatcaatggtctgatcaatattctattctaaacatagcangttgtatttactacttctgctcaaaagtacttatgaagtgaattntcatatagcatggttctagccatctcttgcagagntctattttccttttaactaccccatt

SEQ ID NO: 15026 - DNA, 467 bp, Glycine max
  unsure at all n locations
ttaaaagaacaacatatacattntttgttgttttaagggaataaaaattgtaattaaactagagaattttttattaaatgtgtcactatgacaatgataaatcgattcaacttaatgtggactaaaaaacataatcaaataaatcaaaaattgagaaatcataaatttttattagattatatcngaatttagatttgaatttaaaaattgattcaatcccgtcaaaattgaatatanttttattcataaatntataatggccctcatatgtttatttttattntctatatactttgaaaattatcatataaattatacctatgaaaaatacatttgattaaagaacttttttaactacctatttgaattaagatggataaatatattattagttatacagtgatatataaatgaaatatttgataacataaatgagtcttattatatatatatatatatatatatat

SEQ ID NO: 15027 - DNA, 463 bp, Glycine max
  unsure at all n locations
tgttaacccatggaagctcctaatatctcccacactctgtggtgtgggccattcttggatggccttgattntctcagggtccacttggaccccatttctaacaactacaaaccataagaaaactatattatctacacaaaaagtacacttctctatatttgcataaagggtgtttttcctaaggactgaaatatcatcaaaataagcaactacaaatctacctatgaaatcccttaagacatgatgcataagcctcataaaggtgcttggtgcattagtgagcccaaaagacatcactagccattcatacaaaccaaacttggtcttgaaagtggttttccactcatcaccctttntcttcctgatttggtgatacccacttttaagatcaattnttgaaaagatattggcaccatgcaactcatcaagcaaatcatcaagtctaggaatgagatgcctatac

SEQ ID NO: 15028 - DNA, 476 bp, Glycine max
  unsure at all n locations
taactggtttgttaaatgacatatctaaatctaaatcattttgtgataacaagatttgtcttanaccagttcaatcatatgcatcaaagtataaaaactttcataaaacaaaaaaatggttttgtggatgaaaagctggaaataacattctgagtacaacattatgacaaaaaacattcttagtattgcatttgcataacataaactgagattttcataataacaatattctgataaatttttttatttaaataatgaacatcaaaacataagaaaatgtgcattgacattaggttctcataatcatatcaaacatttcataatgagttttgtgactaaccaagtagagagtttagttatctaagtgtttgaacctctatgttaagactctttgcataccanaataatcttgagtaaaagttcaaaaaaggtaaagtttcaagaaagggtaacanagtcacaataacccctcattc

SEQ ID NO: 15029 - DNA, 453 bp, Glycine max
  unsure at all n locations
atgtctaagtgaaagaataatgattggcgaactctctcttaccaccaaacacctcattaatgtctattatttttctctgtctctctcttgtcattatagatcatatcacttatcatacttacacgtttctttatttctctcactagttgtcaattgtcaaataggttattagtgtccaccaaaattttttgctgagtgaaattacttgaatggctaacctccatttcagcatcatcaagatatccaacagtcaactntgtaatgtcaaccaggaatggatcatccagagagctatgttttgatgagggatcatcaagatcttttccccgaacaatatcaagaataatagcacaatcagttgcagatctacagaaaggaccaagcttatcctagtagaaagaatacatgtaagtntaacattcacagcatcctacanataacaagggatgatat

SEQ ID NO: 15030 - DNA, 366 bp, Glycine max
  unsure at all n locations
cttggagtttccaagtgccaattcgtcttcttctttagtccagtcttcttctggcttcaattcatcagtgggctttccttctgtgtccagcatcttgngatgttcccagcctttgatgacagctttccaggttctgctatccagtgatttgagaaaggccaccattcttgctttccagtattcatagttggttccatcaagaattggtggtctgttcactggtcctccttctttctccatgttcatcagaatttatctccctagatctcactctgtgatttcgagtgttggctctgataccaattgaaattctgatactgnngacagatgtcgtaccggatgtcacgacatcacgcttcagaacat

SEQ ID NO: 15031 - DNA, 434 bp, Glycine max
  unsure at all n locations
tgttcttaagcanaagctaactaatgcccccatacttcttgatatattgttcgcctgaatcggactttcgtttgaaaagttatgaccatttgaatntctccagagctttcgttgttcaatttcgagcatctcaatatattatgcacctgaatcggacctccgtgtgacaagttatgaccatttgaatttctcaagagcattcgttgttcaatttcgagcgtctcgatatattatgcggctgaatcggacatccgtgtgacaagttatgaccatttgaatttctcaagagcattcgttgttcaatttcgagcgtctcgatatattatgcgcctaaatcggagctccgtgttacaagttatgaccatttgaatatctcgagagcanttcgttgtcaattacaagcgtatcgatatattatgcggctgaatcggaca

SEQ ID NO: 15032 - DNA, 342 bp, Glycine max
  unsure at all n locations
ttcacacgacaataactcttgactcggatgtctgnattgttgtcctcgtaatatatcgagacagctcgtatattggaaaccagaagcctctgagcacaantcaaaacgacacataactttttacatcggatgtcccgattgaatcccgtaatatatcgagacgctattaattgaaaatagaagctctgagcaaattcaaacggcaataacttttaactcgggtgtccgattgtgtctcgtaatatatcgagacgctcgaaattgaaaactgaagctctgagaaaaatcgaacgacaataactttttactcggatgtccgattgagtcccgtaatatatcgag

SEQ ID NO: 15033 - DNA, 452 bp, Glycine max
  unsure at all n locations
tcaagaaaaagatggcctcagcanactccttatttccagaagggaattctatcaatagacctccaatctttaatggagagggttaccactactggaaaactcgaatgcaaatttttattgaggcaatagacctaaatatttgggaagccatagaaatagggccttatatacccaccacagtagaaagagttacaatagatggcagttcatcaagtgaaagtataacaatagaaaaacctatagatagatggtctgaagaggatagaaaacgagtacaatacaatttaaaagccaaaaacataataacatctgccctgagaatggatgaatatttcanggtttcaaaatgtaagagtgctaaggaaatgtgggacactcttcgattaacaaatgaaggaactacagatgtgtaaagatctangataaatgcactaactcatgagtatgaacta

SEQ ID NO: 15034 - DNA, 498 bp, Glycine max
  unsure at all n locations
agcttactatatttaagacgctcgaaattgaataacggaagctctcngtgaaatcttatagtcatatcatttcagacggatgtctgattcaggcgcagaatatatcgatacgctcgaaattgaacaacggaagctctcgagaaattcaaatggttataacttctcacacggatgtacaattcaaggacataatatatctagacgctcgtaattgaacaatagaagctctcgagaaagtcacatggttataacttttcacccggatgaccgattcggggacataatatatcgagacacttgaaattgaacagcggaagctctcgacaaattcaaatggtcatcactttccacaagaatgtccgattcacgggcataatatatcgagacgctcganatngaacaacggaagctctcgagaaattcanatggtcataacttatcatacggatgtccgattcgggccataatatatcgagatgctcgaaattgaacaacgga

SEQ ID NO: 15035 - DNA, 371 bp, Glycine max
  unsure at all n locations
taatttctctcaattgcatcttctctcaatgagctagtgaagaagaatgtggcatttacctanggtgaaaaacaaaaacaagcctttgctttgctcaaagaaaagcttactaaggcacttgttctagctcttcttgacttttctaaaacttttgagctanaatgtgatgcctttggagtgggagttggagctgtattgttacaaggtgggcaccttattgcttatnttagtgaaaaacttcatagtgccaccctcaactacctcacctatgataaagagctttatgccttaataagagccctccaaacttaggaacattaccttgtttccaagggaattgtcattcatagtgatcatcaatcacttaagta

SEQ ID NO: 15036 - DNA, 225 bp, Glycine max
cttttcacccggatgtccgattcgggcgcataatatgtctagagtctctaaattgaacaacggaagctcttgagaaattcaaatggttataacttttcacacggatgtccgaatcaggctaatcacatatcgagacgctcagaattgaacaacggaagctcttgagaaattcaaatggtcataactcttcacacggatgtccaatttaggcgcaccacatatagt

SEQ ID NO: 15037 - DNA, 298 bp, Glycine max
  unsure at all n locations
tatgcatcatgtgcactatatgatttgtgtgttggaagataaatntaatcgaagtacgagaagctcaatccaattaaattttagaccagcctaagggggaggtgagcatttgcttaccaccccccattgtcatatcatatagacacaccttgaacatgtncttctatgtttacatgccttatgacacctaagcacacttaagggagaatcttggatttgatcttggaagggggctgaaccatatctaatatttactaatcataattagtgaaattctgactccaaatttggcttcaca

SEQ ID NO: 15038 - DNA, 324 bp, Glycine max
  unsure at all n locations
atatccacatattcattctgataacctcccatagataaaaacttactaataagatagatttattggaataagaataaaaaaatagtattggaagggaaaaagttactgactcatgaatgtatatgattaaaattcttatacaaccagatacatcgaaataagtttcatagaagcccttctaaaaattctctaagacctaattaggtatttaaatataaaatgtaaattataatggttctatggattattaattagtataaatatactattcggggttaatntaaatactattaaaagtatattcatttaacaatacaacatatt

SEQ ID NO: 15039 - DNA, 350 bp, Glycine max
  unsure at all n locations
atcctctgagtcacctgcggctgcagctgctctactatatagattagaagtgtgggtgatatgtatatctattgaagatgtacattgctacttaaagaaagtcctctaagaccacaccacatgccctgactctcatttggtgtcatgacttctatctcaaacctctccaccaataattctagtaaccaattaatggtttcttacctatccttctatctatttattttcaaaaatctcaagagttctcttataccactcgcttcttatatcaataccacaacgggtatttgtntacttggtattatagaggcattattgcagcaaatcaagcattttcaaaagctaatgat

SEQ ID NO: 15040 - DNA, 425 bp, Glycine max
  unsure at all n locations
ctataccaatcttatntagagaacatagcacaacctagattggactaacaaatcttatcctcaaagataaatacaattatgctttagtcagcggtattttggaagatcacaaacttcattttaacaaacttgaaagggctttaattattctaaagcagcagatgcacggggtggaggatcaacaagaaatatatcaagaagctggtcaatggatgttgtaatataatcangatatagctgtgaagctcaaggtcatcttcctctatctcgaacctcacgaggtccnctttaacaaatatactatgaaggatggaaactggaatattgtgtggagagggtaacgctgcagcatcatgaataaataattaccattaggaaagaccaaatatacccatcatctgtatactacatccattattatatat

SEQ ID NO: 15041 - DNA, 374 bp, Glycine max
  unsure at all n locations
agctngaaanngaatctgaagttctattaaatgtcanacgacaatgacgtttgactcggatgttcgatatagtatcgtaatatatcgagacgctcgtaattgaaaacagaagctctgagcaaatttaaacgacaataacatttgactcggatgtccgattgtgtcccataggatatcgagacgctcgtaattgaaaacggaagctctgagaaaaatcaaacgacaataactnttaactcggatgtccgattgagccttgtaatatatcgagacgcttgtaattgtaaacggaagttctaagaaaagtcacacgacaataacttttgactcggatgtccgatngagtcctgtaatatattgagacgctcgtaatt

SEQ ID NO: 15042 - DNA, 451 bp, Glycine max
  unsure at all n locations
agctngcagtgaagcagccaagacatggatgactttgagtttttttgtttttaaaaaaagaacatntttttaatactttatttgggggggttatttcttgtgttttagttacatggtagagttggtagatagtactgcatctatgtgttattggaagctaattgaaactaattgaggatgtgattgtaatgttattgcagaatccggcaccgaagagaggtgagattgtgagacagattggtgaagcattgagggccaagttggatcctttgggtagactggtgtctcttgagatgggaaaaattctcccagaaggaattggggaagttcaggtatcacaattataactgttctgcaactctttttgacatattatcaggtttgacagcatagaaatcagagtttaattgtgtataatactataacacttctttgatggaaactaaatcaa

SEQ ID NO: 15043 - DNA, 282 bp, Glycine max
  unsure at all n locations
tgctttgctcaaagaaaagcttactaaggcacctgttctagctcttcctgacttttctaaaacttttgagctagaatgtgatacctctggagtgggaagtggagctgtattgtacaaagtgggcaccctacngcttattntagtgaaaaacttcatagtgccaccctcaactaccccacctatgataaagagctntatgccttaataagagccctncaaacttgngaacattnaccttgttccaaggaagttgtcattcatagtgatcatcaatcacttaag

SEQ ID NO: 15044 - DNA, 282 bp, Glycine max
  unsure at all n locations
cctctacttttctgaatgtttccaagatctctttctctgcctcttccattntttttggtggaaactgctcttggagggaatggaagaggaaggatgtgctgcttctgcaaatcagaattaccagtggaagattcacctgcacagaaatggttanggtaaattttgtcattacctttntctgggttagagtgaagttggacaggttcatttgcagatgaggaaggtgctacgggttgaggtccttgacactgctttcccgacctcaatgaaatggcactgaca

SEQ ID NO: 15045 - DNA, 424 bp, Glycine max
  unsure at all n locations
agtcacctgcggcatgcaagcttctagaggttgngcttatctaccccatttccnacagtgcttatgtaagcctagtccaggtggtaccaaataaagggggtatggcaatcattcggaatgacaagaatgacctaatcccaacgaagactatcactngtgttggagaaaaatatgcgtcaattacncgcaaagctcacattgaagccacaagggaaaagatcatttttccttttgcctttcatggaccanatgttggagaggcttgcgggacaagcttattactacttcttggatggatattctggatacattcagattgctgtggaccccaaggatcaagagaagacaaccttcacatgcccttttagtgtcttttcctacagatggatgccatttcggttatgtaatgcacctaccacatttc

SEQ ID NO: 15046 - DNA, 254 bp, Glycine max
  unsure at all n locations
gcttcntgtttcaatttcgagcgtctcgatatattacgggtctcaatcggatattggagntaaaagttcttgtggtttgcaattgctacgagcttctgttttcaatttcgagcatctcgatatattacgggactcaatcggacattcgagtaaaaatttattgtcctttgaatttgctaaaagcctctgttctgaattttgagcgtctcgaaatacttcaagacttaattggacatccgagaaaaagtttttat

SEQ ID NO: 15047 - DNA, 383 bp, Glycine max
gattgcggctcgtaatatatcgagacgctctacattgtaaacggatgctcgtagcaaatgcaaaccgcaataactcttaactcggatgtatgattgagtaccataatagatcgagacgctcgaaattgaaaaaagaagttctgagcaaattcaaacgactataactttttactcggatgtctgattgagttccgtaatatattgaggagcacgatattgagaacagaagctctgaccataatcaaaccaaaataactttatactcggatttgcgattgagtcccgtaatatatgaagacgctctcaattgaaaacagaagctcttgaacaattataacgacagttacctttacccgatgtccgattgagtcccgaatatatca

SEQ ID NO: 15048 - DNA, 203 bp, Glycine max
  unsure at all n locations
tcccctaatttcatttggccagagatcatagatttgtgcttggatcgcatccgaaaactcgcagacaactgcactagtctccagactcacttncttaagggttgatggcactatcaatgtagatattactgagttccacaccaaccttgtgccataccccagggtccacttcatcatttctttgtatacttcagttatctcta

SEQ ID NO: 15049 - DNA, 436 bp, Glycine max
  unsure at all n locations
agcttatcatggtagatgttgatcatgctaagtttttagacaaaatcatgaaatttgggtggtgccaatgctttggtgagaaaatctgccacttgatcacttgttgaaactggtagtagctntagagtgcccttcaaaagcttctctcgcacaagatggcaatcaatttccaagtgttttgtgcgttcgtgaaaaaccggatttgaggcaatgtggactgcgctttggttgtcacagtaaagagttggagttctggtaagctgaactctcanatctgcaaaaagatacaacagccattgcaactcacaagcagctgaagacagagccctgtactctgcttctgaagatgatctggacacagttgcttgctttttagcacgccatgacactaaaatttgcctatgaagaaaaatatccagatatggatttttagaat

SEQ ID NO: 15050 - DNA, 416 bp, Glycine max
  unsure at all n locations
agcttataatatatttattacgctcgaaattaaactatcagaagctcttctatattattcaaatggggcataacttttcancctcgaatgtctcgattatggcgacatcaccatatcgtagacgcttcannaaattgaaccagtcggaagccctttgagagaattctaatgggtcatatacttttaacatcggatgtctcgattcagggcgcatcacatnatcgagacgctcgaaaaggaacaacggaagctctcgagaaattcaaatggtcataacttatcacactgaggtccgattaaggattataatatatcaagacgctcgaaattaaacatcgaaagctctcaagaaattcaaatggtcatcacttttcacacggatgtacgattcgggcgcataatatattgatacgctc

SEQ ID NO: 15051 - DNA, 461 bp, Glycine max
  unsure at all n locations
agctataaccaaggggagatggaccatttctagtgcttgaaagatataatgacaatgcttacaaagttgagctgctcggtgagtataatgttagttccatctttaatgtctctgatttatctctttttgatgcagatggagaatccgatttgaggacaaatccttctcaagagggagagaatgatgaagacatgaccaagagcaaaggcaaggatccacttgaaggacttggagggcctatgacaagggctagagcaaggaaagccaaggaagctcttcaacaagtgttgtccatactatttgaatacaagcccaagtttcaaggagaaaagtccaaggttgtgagttgtatcatggcccaaatggaggaggactaaatggcaccactttgtctcaattntagagtgttagtttgtctaaataatagcccaatccttgtaaagttggctgaccaaaaatat

SEQ ID NO: 15052 - DNA, 432 bp, Glycine max
agctatagttcactgcttcaagtagtgcacgatatgtcttcagaggaaaacacgttgcctaaaagttattatcaggccaagaagatactgtgtctgatgggtttggagtatcagaagattcatgcatgccctaatgattgcatactatacaaacatgagtttcaagacatgcacaaatgccctaggtatggggtatcatgatacaaagtgaaggatgatgacgagtgtagtagtgatgaaaactcgaagaagggcccccagcgaaggtgttgttgtatcttcccatcattccaaggtttaggcgtctatttgctgatggagacgaagcaaaagaccctacacgacatgtaaatgggagaaactatgatgaaatgctccatcatccggctgatttgtgcagtggaagaagattgatcattatatccgcatttc

SEQ ID NO: 15053 - DNA, 353 bp, Glycine max
actaagcttgtcgcttcttctgaataactggctaacatacattctataatgctgaagtactattagaaaggggtagccctgatacagctctcatggttttgaggtgggctgggcgggatggtggacctcacgtgacttcactcaaagatgctgtcactgcaatgcgggtgagggttgagtgtgggcttcttactgaagcatttatgcatcagagaatgctctgcaccacagtgaaggaaaagaatttcaataaaacagcatctgggaatacttctgagaagcaaaaaggtcaatgtaataagtgggtggagtggatggaggtcctggtgactgagatatgttgcctctgtatt

SEQ ID NO: 15054 - DNA, 437 bp, Glycine max
  unsure at all n locations
aagcttgttactnnttttggtttataacgtatatagattaatattccttcgcttgcatacactnttcagcacattccatggaagaagcagaagtcctatgtgatcgattatgaatatttgtagacggnggcttgcagtgcatatgcaatccaaaggaggtaacattgcttaattaatatatatgctttatcaacttcatttgcaattaatgggcttgaccctatagataccgggctcaacctataactttggggttattctttctacacccaacaaatttcttctatacccaacatattctaaaaaattataactgtatccttttttacttcttcttcttcttcggtcctatctttttttcttgtcttcgcatagcttatagaaattntagtgttatatatagtgacattaattatnntttaacatgattggtctat

SEQ ID NO: 15055 - DNA, 462 bp, Glycine max
acataaaagaagaatcttgtacgtgtattgttgaggctttaatggaaatatctaaaatacaaggagccccagagataaaccaaataacatggtatctgtaagtaaggaatgagctaggataaatattaacaaggacagttctatactgattgaaacttaagaaactatatgatggcagaaatgcaagtgttatggggggaatcaatgatttctataagagctaacacttactgaggttaaactgtacactgcaggaatctgaataatattcttgcggaagactctcaaacaggaaagcagcggcatataccgtatatagattctaggttgacacttttgttgcaggagtctctcggaggaaatgcataattagcaatgatttgtgctatttcaccatcacacaagtagtatgtaatgcactgctcattcgatatgttttatcttctgatctttctgtattac

SEQ ID NO: 15056 - DNA, 462 bp, Glycine max
  unsure at all n locations
ntgaccccacttgttggacaagtgacctcagtatcttaagaatgtgggttgaattaagatacaaaactttccctaattaaaattntaactttctttcggattaacaatgcacccttaatatgaattactcaaagaacaattcaaaataaacttctttaaagcaaaagataaactgcaataaataaaagaaagttaagagaagagagaatgcaaactcagtttttatactgggttggccacgccctgtgcctacgtccagtccccaagcaacccgtttgagatttccactatcttgtaaaaatccttttacaaagtctgaaccacacaaggacatctttcccttatatttagaaatctttacaacttaagagaccctcggtctcttaaacagatctcttngaataataagaagaagaatattctctctttaagagaatgacattacaattgaagatcgatcaa

SEQ ID NO: 15057 - DNA, 401 bp, Glycine max
  unsure at all n locations
tagtatagctaggcactaacaatctcccnctttggcatattttgtctanaacatacttagacacttcctgagcacgtacgagcagttatgcaagtgggatcaacaactttcattatcagagtaatcaagcacagcggaaattctgcaagttgcaagtcgtttccaggatgtcaagacatcttacatgacatcagctttctgcttctgctccccctgtctccatgctcttactccagcatcttctatcagctactaatcttttccaggatgtcaagacatctcatgtgacatcagcttttccttgtctccatgctcttactgcagcatcttctatcagctactagtagcttacaatagtcatcatcagcagcaggaggctcccccttcaaacatgtacatac

SEQ ID NO: 15058 - DNA, 436 bp, Glycine max
  unsure at all n locations
nttcatacttatcttgattaagccttctctcgattcttgaatcttgagtcttgaatcttgatcatgattcttgggatcttgaaccttgaatcttgattctttactctntaactttcctcttgagacttgaattgttcttgattctatcttgatcacttgagttgntctttgattctatcttgatcacttgagttgttctttgattgatctttgagctttttgtcatcacctttgtcatcatcctttgttatcatcattgttatcatcaaaacatctttgaatgaatcttgattcaccatgaagctttgcttctacatctagccaaatgagcctaccttgaattaattcctttgatagcccctttgaacctatgttcccctttctttgntntgaagctcattacaagccttaagtgaaaaaccatgatctcacccta

SEQ ID NO: 15059 - DNA, 298 bp, Glycine max
cgacaataagttttaactcggatgtcctattaagccctgtaatatatcgagacgctcgaagttgaaaacggaagctctaagaaaagtccaacaacaataacttttaactcgaatgtccgattgagtcccgtaatatatcgaaacgctcgtaatttaaaacagaagctctgagcaaattcaaacgacaaaaacttttaacttcgatgtccgattgagccctataatacattgagacgctcgatattgaaaacggaagctctaaaaaaagtcaaacgacaataactcttgactcggatgt

SEQ ID NO: 15060 - DNA, 325 bp, Glycine max
  unsure at all n locations
atctatccttcctaagatggtgtcagacccagtcaccctcattaagaactagctcttttcttcctctattgcctttagttgaatacacctttgtttggttntctatttggttcttaaccctctcatgcaacttctttacaaactctgacctagattaccattctttatgtataaaagaagtgtccagtgggagaggaatgangtctaacggtgttaggggattgaacccatagacaaccttcaaaagggactgcttgatggttctatgaacccccctgttgtaggtaaattcttcatgaggaagatactcatcccaagacttatg

SEQ ID NO: 15061 - DNA, 371 bp, Glycine max
  unsure at all n locations
gtaaaagtattatcgtttgattttgctcagaaccattttttccaattcgagtgtcacgatatactacgagacacaatcagacatcccgagaaaaagnttttgtcgtttgaagttgctcagaacatctgttttcaatttcgagcgtctcgatatattacagcgttcaatcggacatccgagttaaatgttattgtcattngaatntgctacgagcttccattttcgatttcgagcgtctcgatatactacggcacacaattggacatctgagttaaaagtattggcactttgaatttctcagaacatctggtttcaatttcgagcgtctcaatatctcacgggactcaattcgacatccgagtaaaaagtat

SEQ ID NO: 15062 - DNA, 343 bp, Glycine max
  unsure at all n locations
atgaagctctgataccacttgntatacaagtggccttagatatcttaagaagggngggggggtgaattaagaaattccaaactacttccccaattaaaaatctatttcactttttattcaagttatgaattcccttaatgacaatcttcttaaatattgattcaaataaaacaatttgaatatgaatataaagcaataataaataaaggagattaacggaagagaaagtgcaaacttagaattatactggttcggccacacccttgtgcctacgtccagtccccaagcaacccgcttgagagttccactatcttgtaaattccttttacaagttctaaacaca

SEQ ID NO: 15063 - DNA, 400 bp, Glycine max
aaagcttatagatatgggagggagaataaaacaatcttatataattttacctggcaagcaacgaagagttctttttgcggcttttagatgacgacaggtacgagcctccatacagcgacacacaactcccaccgcatatagaatatcgggccttgtattggttatataccttagactccccacaagactcttgaagatcgtggagtctaccttctctcctttatgaaactgtgataacttcaagccaccttccataggtgtgttcacgggattgcaatcaagcatattaaatatcttaacacttcttttgtgtacctatcttgtgagacaaagataccattctccgtttgcttcacttgcattcccagaaatatgacatgagtcccatagtctgcatatc

SEQ ID NO: 15064 - DNA, 416 bp, Glycine max
tctggcatggaatgacttggcaattgccttctttatgcagcaccattacaacactgatatggctcctgatcagaaccaacttcagagcatgaccaagcgggaatatgagtccattaaagaatatgctcaaaggtggagagacctagcagcccaagtcgtcccacctatgactgagagggaaatgatcacgattatggtagatatgttgcctacgttctactacgagaagctgataggatatatgccggctaactttgcagacctcatcttcgctggagaaagaatcgagtccggactgaggaaaggcaagtttgaatatgcctccaacgctgcccccaacaataacagaagagccccagtggtgggcacacgataaaaggaaggagatacccacgtggtcaccaccgccccaacat

SEQ ID NO: 15065 - DNA, 329 bp, Glycine max
atggatcatctaaataggttaatttcaaaagatctagtttttggatggcctaaattaaatctaaaaatattgtttccaccactaaaccattgcaataattacacatggatttgtttggaccatctagggtcatgagctttggtggaagttactatgcattagtaattgttgatgattattctagatatacttggactttatttcttactcataagaatgatgcatttcatgcatttagaagacttgccaaagtcattcaaaacaaaaagaatctcaaattatctccatcagaagtgatcatggaggtgaatttgaaaacattgattttg

SEQ ID NO: 15066 - DNA, 249 bp, Glycine max
  unsure at all n locations
gggagaactaccataagggatagagcctttgtgctaagtgcatgtnnagaaacaagccagacaaggcaagtaaggttgtgagaaacaagacaagattggttgccaaaggttactcacaatangaaggtatagactatacataaacctttgctcatgttactcgtctaaagcaatacacattatactctcatttacagctcatacaaaaatgagactatatcaaatagacgtaaaaaggcattcctcaat

SEQ ID NO: 15067 - DNA, 354 bp, Glycine max
  unsure at all n locations
gcttatctcatgtgggtacatctcaataaattcattcttggagagcttcatggttttggttatcacgggaaggatcattgcagatgcgggaagcatgaccacggatctcgctagaggtgctgatgtagttggtgatatttttgggatcattgatcgtcgtacgaagattgagccggatgatccanatgggtacatgctagagaggttaattggtcaaatagagcttcatgacgtgcattttgcgtaccctgctaggcctaatgttgctatctttgaaaatttctcgatgaanattgaggcacggaaatcaacagcattggtggggcaaagtgtgtccgggaaatcgaccatcat

SEQ ID NO: 15068 - DNA, 313 bp, Glycine max
agcttgtatctcacagttgcctctctccttcacggtcaggtgacaataataaatttacaaacagatgcgtactactacattattattattattataattactgatattcaatgattaattatatgcaattgtcattaacttagtagtaatgctatgcttttgtaggtgttattatgcttagatggaaggagttaagcattcgggtccgaccaaattggttctatattctacggaggccacaaacattctctacacattccgtggacatgctgttactgtataagacaacctcagatatatattcgtgtctttt

SEQ ID NO: 15069 - DNA, 442 bp, Glycine max
  unsure at all n locations
acacgcagctgttgcaaacattcagaagatttaagtatatatntaatatagaactngtataaaagaaaaatagacaccaccagataattaagtggttcaactntggcatatgtgcaaatgcaaactagctaccaattaagattctcgacaatcctcanagcaacatcacataaacacttcaaaccatcctctctgggagcaagctcagtaggataaaccaaacccgggtagagtttgaacaagttgtgacaaaacattgggtaatcagaagctgcagtgatgtgcatggaagcatagtcacatgcctcattagccaaatcatgtgcagaagcttggagggcatcactggcatacttgtacttttctacacactccttcagcacccttttaaggtggaatccttgttgcagtgcaagcaactgagaagaaaatagagagaagt

SEQ ID NO: 15070 - DNA, 303 bp, Glycine max
agggactgaatcacacattcgagtaaaaagttcttatcgttagaatacgcacagaacttcggtgttccattctgagcaactcgatatattacgggactcaatcagacattccagtaacaagttattgtcgtttgaatgtggtcagagcttcgataatcaatttcgagcgtctcaatatattacgggacttagtcagacatccgagtaaaacgccattgtcgtttgaatagactcagaacttaggtcttcactttcgagcgtctcaacataattctggactcaatcagacatccgagtaaaaag

SEQ ID NO: 15071 - DNA, 349 bp, Glycine max
  unsure at all n locations
gttaaaagtgattttctaaatggcttaattcaagaagaagtatatgttgaacaaccaccaggttttgaaatattggataacccaaatcattgttataaattgaaaaaggtnttatatgggcttgaaacaagcccctagggcttggtacgagcgtctaagtaagttcctttagaaaaggactttctaganganagtggatctattcttttataaagagaaaacacatgatatttactagtcaaaatatgttatgacattattttggaccactaacaattgtgtgcaggaattctccatgacatgcaagtgagttgaatgtcatgatggaaattatttcttcttggataca

SEQ ID NO: 15072 - DNA, 383 bp, Glycine max
  unsure at all n locations
gcagcatctatgttagtganggctgtgattcacctcanggttcnttcgagntttgatcccacaatcaagggggacccacaaaatgtttttctcaagcactgcgagcatcttattgatcctatcagcaatatcatcacttggtggtattctcggagagtgaatgttataaactccggggccaattcctgctccatacttaactccttcacagaacactgacaggagctcttcttctgagcgagaattttcgatggtgatcacatacacatccatatcaatgatcgagtggatgatgtcattgaaattagagtaacacatgtgcgtgtggatctgtcgattgtatagaatacaaaacatattatattttgatggaatgcgttcta

SEQ ID NO: 15073 - DNA, 324 bp, Glycine max
agtttaatcattcaatttcgaccgtctcgatatattacgggactcaatcagacatccgagtaaaaagttattgtcgtttgaattggctcagaggttcaaaattcaatttcgaacgtctcgatatatttcgggactcaatcagacatccgagtaaaaagttattgtcttttgagttggctcagaggttcaacattcaatttcgagcgtcccgatatattacgtcactgaatcggacatccgagtaaaaagatattgtcggttgaatttgctcagagcttcaacattcaatttcgagcgtctcgatatattacgggactcaatcag

SEQ ID NO: 15074 - DNA, 316 bp, Glycine max
agcttcttatgattgtttgttcctaatttctctacaattgcatcacctctcaatgagctggtgaagaagaatgtggcatttacctgcggtgaaaaacaagagcaagcctttgctttgctcaaagaaaagctgactaaggcacctgttctagctcttcctgacttttctaaaacttttgagctagaatgtgatgcctctggagtgggagttggagctgtattgttacaaggtgggcaccatattgcttattttagtgaaaaacttcatagtgccaccctcaactaccccacctatgataaagagctttatgccttaa

SEQ ID NO: 15075 - DNA, 387 bp, Glycine max
ctgcattttaataatatataataagagaactatgactatggaagaatctattcatgtttcctttgatgagtctaatgttattcctccaagaaaggatattttagatgatattgcagaatctttagaacaaatgcatatttatggacaagattctaaaggaaaagggaaagaaagcaatgaagatcctccagaagaagccaaatcaaatgatgaacttccaagagaatggaaagcttcaagagatcatccacttgacaacattattggtgatatctcacaaggggtaacaactagacattctcttaaagatgtatgcaataatatggctcttgtgtctatgattgaacctacaaatttaaatgaagccataatagatgatcattggat

SEQ ID NO: 15076 - DNA, 403 bp, Glycine max
  unsure at all n locations
agcttcatcattattttcgagcgtctcgatacgttacgggactgaatcagacatccgagtaaaaagtattatcgtttgagttgctcagagcttaacattcaatttcagcgtctcgatatatgacgggactcaatcagacatccgagtaaaaagttattgtcgtttgaattggctcagagcttcaacattcaatttcgagcgtctcgatatgttacgggactcaatcagacatccgagtaaaaagttattgtcgtttgaatntgctcagagcttcaacattcaacttcgagcgtctcgatatattacgggactatatcagacattcgagtaaaaatatattgtcgtttgaatttgctcagagcttcaacattctatttcgagcgtgtcgatatattactggact

SEQ ID NO: 15077 - DNA, 368 bp, Glycine max
  unsure at all n locations
cgacaataacattttactcggatgtctgattgagtcccgtatatatcgacacgctcgaattgaatgtngaagctctgagccaattcaaacgacaataaatttttactaggatgtctgatataatcccataatataacgagaccctcgaaattgaatggtgaaactcttgaccaattcaaacgaaaataacttttactcggatgtctgattgagtcacgtaatatatcgacatgctcgaaattgaatgtgaactctgaccaattcaacgacaatacttttactcgatgctgatgagtccgtacatatcgagacgctgaattgatgtgagctctaccaatcaacgacataactttctcgatgctgatgat

SEQ ID NO: 15078 - DNA, 345 bp, Glycine max
agcttgcttttacggagttttccgactatcctctcgtgtggtggatcaagctacaaaaggagagagcatgaaatgaccagccaatggttgatacatggacggagatgaaaaagatcatgacgaagcggtatgttccggctagttactcaagggacttgaaattcaagctccaaaaactaacccaaggcaacaagggggttggggagtatttcaaggaaatggatgtgctcatgattcaagcaaatattgaagaagatgaggaggtaactatggctcgatttcttaatggttcgactaatgatatccgtgatattgttgagctgcaggagtttgttgaaatggatg

SEQ ID NO: 15079 - DNA, 458 bp, Glycine max
  unsure at all n locations
tgagacaacttccttgagaagctagatcttagctacacacttccctctcataactatgctcacctccttgagaagcttccttaagaagattcctaaagaagctagagcttagctacacacacatctctaatagctaagctcacctccttgagatgagaagctagagcttagctacacaccccctataatagctaagctcacccccataacaaaatacatgaaaatacaaaaaaattccctactacaaagactactcaaaatacctcanaatacaaggcaaaaaccctataatactagaatgaccaaaatacaaggcccaaacgaaggagaaacctattctaatatttacaaaaataagcgggctcatacttagcccatgggctcaaaatctaacctaagtatcatgagaaccctagggccttcccttggatctctggcccaatctgcttggagtcttc

SEQ ID NO: 15080 - DNA, 431 bp, Glycine max
  unsure at all n locations
attgtaaaaatagaaagcttttttgaaacacgtaattaatatattttttgtattaccaatttatgtatattcgatctcttggtaatttcctgtggttttaatcttcctttgggtattgtttgtaagtctctaacgtgctgtttaacttgaatgcatagatctaaacatccctgacgtactttgagaaaacaaatagaatnntagttaaaaattacatanttcgttttagttaaaattattttttatgtatgcgttgaaatgacttgttatanctcattttgttntaaaaaaatatttattttgaacaaaataactaanaatatttaatataanattaaatttaaataatnnttgtcacatgaaaagagatgttttgataaattatttatgccattaatantttagaatatataaatattataattttatat

SEQ ID NO: 15081 - DNA, 269 bp, Glycine max
  unsure at all n locations
gtctccgttggccttctccagtatcttcttctgcacactgtacccgaatntgccgtcgctgtgctccctccagagggagtcgatggccctgagggcgctctcggagatgaacttcacctccgagaagaagacgtagccgcgcttctgtgcggcttcgccagcaagcacgatgaggagacgacgcgtctcctcatcggccagctgaaagttattggtggagagatggtggcggaggaggtccaaggacagtgtggtttgggaggtggtgg

SEQ ID NO: 15082 - DNA, 274 bp, Glycine max
atggatccaaacccagtccctctcattaagaactagctcctttcttcctctattgcctttagttgaatacacctttgtttggttctctatttggatcttaaccctctcatgcaacttctttacaaactctgacctacattccccttctttatgtataaaagaagtgtcaagtgggaagggaatgacgtctaatggtgttacgggattgaacccatacacaacctcaaaatgagatggcttggtggttctatgaacccttctattgtaagcaaat

SEQ ID NO: 15083 - DNA, 349 bp, Glycine max
  unsure at all n locations
agcttattgtctagaatgggcatagatgaacccaactagattaattgcccttctaattgtcttccttatcaagggaagcttaccaatgtcttcaagcctcaaatcaatacaatgggatgcacaaggagtctaataaatatgtttccttttgtcttctaacaacttacccgctaaaacatagttgctcccattatcagttacaacttaaacaacgttctcttctccaacttcctccacaatagcatcaagcaactcagaaagcttttcacctgtcttcacaaaatcagagccatcaatagacttcanaaacattgtaccagcttgagagttaagcaaaaaattaatgatg

SEQ ID NO: 15084 - DNA, 309 bp, Glycine max
agcttctctatatattatgcacctgaatcagacttccgtatgaaaagttatgaccatttgaatttctcgagagcttccgtggttcaattccaagcttctcgatatattatgcgcctgaattggacttccgtgtgacaagttatgacaattttaatttctcgagagcattcgttgttcaatttcgagcgtctcgatatattatgcgcctgaataggacttccgtgtgatcagttatgaccatttgaatttctcgacagctttcgttgttcaatttcgagcgtctcggtatattatgcgccagaatcggac

SEQ ID NO: 15085 - DNA, 206 bp, Glycine max
  unsure at all n locations
atcaatggtcttattctaaagctaactaattccgccacacnncttgatatatagngcgcctgaagcggactttcggcnganaagacatgaccatttgaatttctccagagctttcgttggtcaatttcgagcatctctttatattatgcacctgaatcggacctgcgtgtgacaagtcatgaccatttgaatttctcaagagcatt

SEQ ID NO: 15086 - DNA, 386 bp, Glycine max
  unsure at all n locations
agcgtccttaagttgattcctaaagaagctagaagctagctacacatacctctctaatagctaagctcacctccttgagatgagaagctagagcttagctacacancccctataatagctaagctcacccncatgacanaaaacatgaaaataaaaaagaagtccttattacaaagacagactcaaatgccccgagatacaaggctaacaccctatactactagaatggccaaaatacaaggcctagacgaagganaaacctattctaatatttacaaagataagcgggctcatacttagcccatgggctcgaaatctaccctaaagctcatgagaaccctanggcctntccttggatctctagcccaatctacttggagtcttct

SEQ ID NO: 15087 - DNA, 461 bp, Glycine max
  unsure at all n locations
ntactatgcagagaatatccaaggaatataccttcatctgacttatcatcaaatattcctaagttatcttttccattattcaatacaaaacatttacaaccaaagatatgaaggtgtgagatgtttggttttctgccattgaacaattcatatggagttttctttaaaatgggtcttattaaagccctatttaaaatgtagcatgcagtgttaacgacttcagcccaaaagtattttggaagaggagtatcatttaataaagttctagcaatctcttccaaagatctatttctcctttcaacaacaccattttgttgaggggttcttggtgcaaaaaagttatgctcaatcccatgcttatcacaaaatatttcaaattctttattttcaaactcacccccatgatcactcctaatagatataatctttagatttttcttatattgaatgatttttgcaag

SEQ ID NO: 15088 - DNA, 419 bp, Glycine max
  unsure at all n locations
gcttgtaggcctaggatcttcttcatcaatgtattcctttgcttcttggaagatgaatgtctgctgaatggagaaaggaagagagagaggagacgccacttcaaggagaagatgagtctacaagaagctcaccaccatacgaggccatggataatagcttggaggaagaaagagatgaatgaggggagagggagagaagagcacgaaattttgtgctccaaatgagctctgaaatctgaagtttaatattcaaatgatcaaagttganaaaaatgcacacacatgacctctatttatagcctaagtgtcacacaaaattggagggaaattcaaatttcacttgtatttgaaattgaatttgtggagccaaactctggagccaaaatttcactaattatgatcagtgaatgttagttatg

SEQ ID NO: 15089 - DNA, 295 bp, Glycine max
  unsure at all n locations
ttcttgtatataagcatgattgggagcttactatatttaacagctagcagacctgacatcacctatgcagtaggtgtttgtgcaagatatcaagccaatcctaagataagtcacttgaatcaagtaaagagaattctgaaatatgtaaatggcaccagtgactatgggattatgtactgtcattgttcagattcattngctggtgggtattgtgatgctgattgngctggaagtgcaaatgacagaaaaagcacttctggtggatgtttctatttgggaaccaatcttatttcat

SEQ ID NO: 15090 - DNA, 442 bp, Glycine max
  unsure at all n locations
tagtagggaatctatccttcctaagatggagtttaacccattcaccctcattaagaactatctcttttcttccttaattgcctttagttgaatacacctttgtttgtttctttatttggttcttaaccctctcatgcaacttctttacaaactctgacctagattccccttctttatgtataaaagaagtttctagtgggaggggaatgaggtctaacggtgttaggggattgaacccatagacaaccttaaaaggggactgcttggtggttctatgaaccccctgttataggcaaattctacatgaggaagctactcatcgcaagacttatggttgcctttcagaanagcccttanaagggtggataaagacctattcactacctctgtttgcccatcagtttgtggatgacaagtggtagagaaaacaagtttagttcct

SEQ ID NO: 15091 - DNA, 353 bp, Glycine max
  unsure at all n locations
agtttgatttttatgagtnagctngggaaaaggacaagctaacttggagaaaccttctatgaatctctagtaatatcccgctaaacccagaaaaattctgatctcaaacacaaacttaggactctaccacttaagaacaacttttatcatacagggatctacaactatacctccttaggatatcacatgtcctaagaaactaactttctctaaccaatactcgcacttggacaacttactgtaaagatgctggtccctaagggtttgcaagacaatcctctagtgctcttcatgctcctctctagtgctggagtataccaaaatatcatctatgaatactaccacgagctatc

SEQ ID NO: 15092 - DNA, 433 bp, Glycine max
  unsure at all n locations
gattcctaaagaagctagagcttagctacacacactctctctaatagctattctcgcctccttgatgtgagaagctagaacttagcttcacacacctttctaatagctaagcacacctcctagagatgagaagctagagcttagctacacaccccctataatagctaagctcacccncatgacaaaatacatganaatacaaaaaaagttcctactacaaagactactcaaaatgcctcgaaatacaaggctaaaaccctatactactagaatggccaaaatacaaggcccaaatgaagggaaaacatattctaatatttacaaagataagtgggctcatacttagcccatggactcaaaatctaccctaaggctcatgagaaccctagggccttcccttggatctctggctcaatctacttggagtctttta

SEQ ID NO: 15093 - DNA, 437 bp, Glycine max
  unsure at all n locations
accaacgaccataactatttactcggatgtctgatagacgctcgnaatatttctagacgctcgaaatcgaatgttgaagctctgagccaatacaaacgatactgactttatactcggatgtctgattgagtcccgtaacatatcgagacgctcgacattgaatgttgaacttctgagctaattcaaacgacaataacgattttctcggatgtctgactgagtcccgtaacatattgagacgctcgaaatagaatgttgaacctctgagctaattcaaacgacattaactctttactcagatgtctgattgagtcccgtaacttatcgagacgctcgacattgaacgttgaagctccgagcgcattcaaacgaccataactttatactcggatgtctgattgaggctcgtgatatatcgagacgctcgatattgaatg

SEQ ID NO: 15094 - DNA, 173 bp, Glycine max
  unsure at all n locations
gcactcattgcanatgcgtcatcctcagctgacatgacgataagccactatggattgcttcttagaactccacgatattggtgttgcaccatacgtgaatatgcaacctatagtactcgctatgtaattttggactcatccccaatccgcatcagtatatcccactaattctt

SEQ ID NO: 15095 - DNA, 338 bp, Glycine max
  unsure at all n locations
agctntgttttcctttgttccgganacctttcttttctcatgtgcacccaaacccaatctccgggttcgaagacaaccttctttctccctttgttggcttgtttagcatagcttttatttttcctctcaatttgatctttgactctcttatgaagcttcttcacatagtccgcctttgcttgaccttctttatgcttaaaaacagaaacattatgcaaaagatcaagaggagttagtggattaaaaccataaacaacttcaaaaggagaacaattagtggtgccatgaacagctctattgtaagcaaattcaacatgggggtaaacaagcttccaagt

SEQ ID NO: 15096 - DNA, 423 bp, Glycine max
  unsure at all n locations
gtgagaagnagtctattgctnttctctcatatccattcatggtttgtgatattataatgagagcccaacatgataatcctgttgttgtgggtgatgcccgaaacacttgaataccctntacgatagctccacacttgcagtacatgtcaataattatggtgagaacaacgacattcaactcaaaattcccctttttacataatcatgaacccactccccatgtagaagtgcacctaagtgagcataaacacttaacaaactcatcactgtaaattcactaggctgaacccttcgtctctgcatcttgcggaaaagctccaatgcctccataagccttttattcctaacatatccactaatcatagaatnctaagtaactctaattcttgtaggcatgttatcacacaaccctctagatttatc

SEQ ID NO: 15097 - DNA, 335 bp, Glycine max
  unsure at all n locations
cgaacaacaataacttttcactcggaagnctgattgagtcctgtaatatttcgtgacgctctagtgntaaaaccgaagctcgtagcatattcgaacgacaataacatttcactcggaagtcctattgagtcccgtaatatatcgagacgctcgaattatagaaccgaagctcgtagcaaattcgaacgacaataacatttcactcggaagtcctattgagtcccgtaatatatcgtgacgctcgaattttataaccgaagctcgtagcaaattcgacgacaataacatttcactcggaagtcctattgagtcccgtaatatatcgagacgctcga

SEQ ID NO: 15098 - DNA, 326 bp, Glycine max
  unsure at all n locations
tttcttgttgganaactngatgccttggtcaacctagtgacccagcttgccatgaatcananatctacacctgttgcaagagtctgtggtctatgttcttctacagatcaccatacagatctctgtccttctttgcagcaatttggagtcaatgagcaacctgaagcttatgctgcaaacatttataatagacctcctcagcagcaaaaccaacaacactagaataactatgatcttttcagcaacagatacaatccaggttggagaaatcatccanatctgagatggacaagtcctcgacaacaacaacagtctgtcccttcttt

SEQ ID NO: 15099 - DNA, 425 bp, Glycine max
  unsure at all n locations
agctntttaatatttaaattcaaatttctaaaagctgtgacaaatagtttaaacttctggtaatcgattacgtaccttgtgtaatcgattacaggcttttaaattcaaattcaaaatttgcaaatttgtttagaaatcaatttaaccactggtaatcgattaccagagacgaaatatcatatttttgaaaatatgattgttcttaaaaaacttttgtaaaatatttcctttagtcctgtgcagcatcaattaagggaatttttctaagatcctaactaagtacatcattcttcttgcatttctaaattcttgacttgaatcgntgtcatctttggcatcatcacaacttcatatcatatatatttctacacataatttcattaaaaaaataagtgtatatttttaaaataaataacataaactga

SEQ ID NO: 15100 - DNA, 448 bp, Glycine max
  unsure at all n locations
ttcttctaatgtccatgatntatcttgttctatacattttttagttttaacacacaaactcgtgatttattcaaacaaaaaggatgaaattgggagcacgcacgcaagaaacttacttgttggtggcatagttgacaaggttggaaaagagaatgccaagggtgatattcaactggaaaagtatattcaatgctgcacgtattcttgaaagtgcgatctttgaaagaaaaactggcacaacctgttgtcataaaaaaaaattaaaccaacaaagataagtgagttcgaagaagcacttgctattacacaacattgaacactggtttcataaataaaataaacacacacatgcatatggcagaatgtctatataacgaaaatagaatgacanaccctcattacaataaattaatatcttcaattgaacaacattttgacctatttattt

SEQ ID NO: 15101 - DNA, 450 bp, Glycine max
  unsure at all n locations
agctncatnattatgcttcctccagaagcttcctcgtggctgctntgagaagctttctcaagaagcttctttgagaagctagatccttatctatccacacccctctattaactaaattaacttccttaaaaataattacggatgaaaataacgcaacaaatattcaaacatcaaacataattactaatagtatatagatatatatatatcagggtgttacaactctcccacccttttagaaatttcgtcctcgaaatttaccttactcaaacaaggatgggtgagcttctcacatctgactttctaattcccatgtggcatcttctcctgatgcacctccccagatcaccttgaccaacagaatctctntccctcttaagtgtgttgtgtgcctatcctcgatcctcaaatgcactgtttcatatgtcacaatctccttcacttgtacat

SEQ ID NO: 15102 - DNA, 233 bp, Glycine max
tgaaacctgttgaaatgagaactttggagaaatttttaaaattgtgaccaaatttcagaacatggtttctttagacatgaaggctttcttttcaaagaaaacaaattgtgtgtgcctaaatggtctactagaaatttgcttggttgtgaagcacatgaaggaggtttaatggggccatttggggtccaaaagactctagaaacattacaagaaccattttattggcctcatat

SEQ ID NO: 15103 - DNA, 359 bp, Glycine max
gtttgatccactgacattattacaacaacaatagtcctacatactacatgcccttagagtttagaagatttgtcaactggatccaaaaccatagcagaaaagaatgtaaataacatgtgaataaaaacctgaccaaccaaattgcaaatatgaatttgctggggaagaaaggggtagtcagtataagtgtaaaaccaagaaccggatcagaaatgtagaatgtctccctgtgatacttgttgagaggagcattgagagcaaatctctttggcaaatctggattagccaagaacaaacgaccgtaagcaacagatcagccctgtcttcagctactgcattgatcccatcttgcgatcata

SEQ ID NO: 15104 - DNA, 376 bp, Glycine max
  unsure at all n locations
agctagtgttttcttaccctgatgaggatgtcccatatgtgcttataactggactgattcatttgcttccaaagtttcatggccttgcaagtgaagacccgcacaaacatttgaaagaatttcacattgtctgctccaccatgaaacccccagatgtccaagaggatcacatatttctgaaggctnttcctcactcattacagggagtggcaaaggactggctgtattaccttgctccaaggtccatcacgagctgggatgaccttaagagagtattcttagaaaaaattttccctgcttccaggaccacagccatcaggaaggatatctcangtattagacaactcagtggagagagcctgtatgagtactggga

SEQ ID NO: 15105 - DNA, 380 bp, Glycine max
  unsure at all n locations
ttctgccttcttctatcctcagattgggaatgcctctaacagcacctttgtcaatgattttcttcatgcctcttaagtgcagatgtccaaatctntgatgccatattctgacttcatcttctctggagaatagacatgtggaggagtaactggtttcttgatgtgtccataggtaacagttgtcctttgatctactgcccttcatcagaacttcactcttctcatttgtcaccaagcattctgactttgtgaagtttacattgaatccttcatcacacagctgactgatgctgatcaagtgtgcagtcagtcccttcaccagcagtactttgtccagactaagaagtccatcatggactaactctcccattcagagatct

SEQ ID NO: 15106 - DNA, 400 bp, Glycine max
  unsure at all n locations
agccttcacatttcaatttgagcgtctcgtaatattacgggactcaatcagacatccgagtaaaaatttattgtcgtttggattggctcagagattcaacattcaatttcgagcgtctcaatatattacgggactcattcagacatccgagtaaaaagttattgtcgtttgaattagcttagagcttcaacaatcaatttcgagcgtctcgttatatcacgggactcaatcagacatccgagtaaaaagttattgtcgtttgaattggctcagagcttcaacattcaatttcgagcgtctcgatatatgacaggactcaatcanacatccgagaaaaaagttaatgtcgtttgaatttgctcaaaggttcaacattcaatttcgagcgtctcgttatatt

SEQ ID NO: 15107 - DNA, 390 bp, Glycine max
catggaaggacttggcaactgccttcattcggcagtaccagtacaatacagacatggctcccgatcggaaccagcttcagggtatgactaaacgagagcatgagtccattaaggaatatgcccagagatggagagtgaaattctgataccaggggacagatgtcgtacaggatgtcacgacatcacgcttcagaacatgcagattgtatgtgtccgtatgaacagattaaacaagtaaataacacaagagaattgtaacccagttcggtgcacctcacctacatctgggggctaccaagccagggaggaaatccactctcaatagtgttagttcaaggtctaacaacccctgtttacaaccttctcacctaaccactacccgtgcgatct

SEQ ID NO: 15108 - DNA, 391 bp, Glycine max
  unsure at all n locations
ttacgagcgtctcgaaatcctacggaacacttattggacatccgagtganaagttattgtcgttgtaatttgctcagaacttctgttttanaatacgagcgtttcgatatattacgggactcaatcggacatctgagttaaaagttattgtcgttggacttttcttagagcttccgttntcaacttcgagcgtctcgatatcctacgggactcaatcggacatccgagtaaaaagttattgtcgtttgaatntgctcagagcttctgtnttcaattacgagcgttttgatatcctacgggacacaatcggacattcgagtcaaaagttattgtcgtttgacttttcttagagcttncgtttacaatttcgagcttctcgatatattacagg

SEQ ID NO: 15109 - DNA, 387 bp, Glycine max
  unsure at all n locations
actcttgctcgagaatggagaattgcactaagcaatcactacgcatagctctcttactcgaaggtggaggacacatgaacgagaacacaattcatggnngctccgaaaaggggttgagaatggagaattacactaagcaatcactacgcatagctccaaacttgaaggtggaggacacatgaacgataacgcaattcatggtgctccgacaagattgagaatggagaattgcactacgcaatcactacgcatatctccaaacgcgaaggtggaggacacatgaatgaaaacgcaattcatggggctccgaaaagattgagaatggagaattgcactaancaatcactacgcatagctccaaactcgaaggtggaggacacatgaatg

SEQ ID NO: 15110 - DNA, 218 bp, Glycine max
  unsure at all n locations
tactcaagggacttgaaattcaagctccaaaaactaacccaaggcaacaagggggttgaggagtatttcaaggaaatggatgtgctcatgattcaagcaaatattgaagaagatgaggaggtaactatggctcgatttcttaatggtttgactaatgatatccgtgatattgttgagctgcaggagtttgttgaaatggatgatntgcttcacaaagc

SEQ ID NO: 15111 - DNA, 353 bp, Glycine max
  unsure at all n locations
cattcaatttcgagggtctcgatatatgacgggactcttctgacatccgagtaanaagttattggcgtttgaatttgctcagagcttccgtattcaatttcaagcgtctcgatatattacaggactcaatcagacatccgagtaaaaagttattgtcgtttgaatttgctcagagcatcaagattctatttcgagcttgtcgatatattatgggattcaatcggacatccgagaaaaaagttattgtcatttgtatttgctcagagcttcaacattcaatttcgagggtctcgacatattacgtgactcaatcagacatccgagtaaaatggtattgtcgttttaatttgctc

SEQ ID NO: 15112 - DNA, 233 bp, Glycine max
atacgatattgctgacacaataatctcttctatatagttactgagaatcattgtgtctgcaacacaaatggaatccaggtcatcacaatcaagatcagtggctgcaagcacttccatgatatggctcttgttatcctgaactgtgatcatcttcatatcctcttccaattgagacttccagctgacaagatgtgattcatcttctgggggcctgatgtctatgttgtatggga

SEQ ID NO: 15113 - DNA, 313 bp, Glycine max
  unsure at all n locations
aaaatggtgacaaactccacatactacacatgtaaaacattaacaagccatcctgattcctaaacacatgatatgcatcttcattttcaaagccacggactgaggtccatcatctacaccaagcttctcaaggtcctcaaaaaaagcatcgggattnttcttccacaactcttccaccttatttatttgctgttcacttatntggcgagcccttaactgcttcttaaggtataagacttgtatattctctatgtgataaccctaaaggcactttcttgaagcatcatatgatatgcccaaatcatcacattct

SEQ ID NO: 15114 - DNA, 345 bp, Glycine max
  unsure at all n locations
gccatttgaatttttcaagaccttccgctgctcaatttcgagcgtctcgatatattatactcctgaatcggacctccgagtgaaaagttaagaccatttgaatntctcgagagcttccgttgttcaattttgagcgtctcgatatattatgcgcctgagtcggacctccgagtggcaagttatgaacatttgaatttctcgagagcttccgttgctcaatttcgaccgtctcgatatattatactcctgaatcggacctccgagtgaaaaagtatgaccatttgaatttctcgagagcttccgttgttcaatttcgagcgtctctatatgtgatgcgcctgaatc

SEQ ID NO: 15115 - DNA, 353 bp, Glycine max
  unsure at all n locations
acgacaataactgtttacatggatgtctgtttgagtcctgtcatatatcgagacgctcgaaattgaatgttgaatctctgagccaatccaaacgaacaataacttttactcngatgtctgattgagtcccgtaatatatcgagacgctcganattgaatgttgaagctctgagccaattcanacgacaataactntntactcggatgtctgattgaggcccgtaatatatcgagacgctcgaaattgaatgttgaagctctgagccaattcaaacgacaataactntntactcggatgtctgattgagtcccgtcatatatcgagacgctcgaaattgaatgttgaatctctg

SEQ ID NO: 15116 - DNA, 267 bp, Glycine max
tctaccccattttcgatagtacttgtgtaagcccaatccaggtggtaccaaagaaagggggcatgacaatcattcagaatgaaaagaatgacctaatcccaacaaggactttcactgactggagaatatgcatcgattaccacaagctcaacgaagccacgaggaaagaccactttctttttcctttcatggaccaaatgttggataggcttgcgggacgggcttattactacttcttgtatggatactttggatataatcaaatta

SEQ ID NO: 15117 - DNA, 329 bp, Glycine max
  unsure at all n locations
gatctttcactttcaggtgatatatttaatgatgtggtgggcagcccatactatgtagccccggatgttctgcganagcgttatggtcctgaggcagatgtttggagtgctggtgttatcctttacattcttttgagtggagtacctccattntgagctggtgagatcttttgtatttatttggacagtgtaattatgacctctattcatataaatgtatgcctttcttttttctgattattaattctcccttcgtctttgtgtggttcatatggttgtgtagaanacgaacaacggatatttgaacaagttctgcgtggtgatcttga

SEQ ID NO: 15118 - DNA, 314 bp, Glycine max
aagctacaaaaggagagagcatgaaatgaagagccaatggttgatacatggacggagatgaaaaagatcatgaggaagcggtatgttccggctagttactcaagggacttgaaattcaagctccaaaaactaacccaaggcaacaagggggttggggagtatttcaaggaaatggatgtgctcatgattcaagcaaatattgaagaagatgaggaggtaactatggctcgatttcttaatggtttgactaatgatatccgtgatattgttgagctgcaggagtttgttgaaatggatgatttgcttcacaaagc

SEQ ID NO: 15119 - DNA, 318 bp, Glycine max
  unsure at all n locations
catcagaccacttccgggtgctggagctacttcattttttcttgatggggcctatgcaagttgaaagccttgtaggatagacgtatgcctatgttgttgtggatgatttctccagatntacctgngtcaactntatcagagagaaatcagacacctttgaagtattcaaggagttgagtctaagactccaaagagaaaaagactgtgtcatcaagagaatcacgagtgaccatggcagagagtgtgaagacagcaagtttactgaatactgcacatctgaaggcatcactcatgagttctctgcagccattacaccac

SEQ ID NO: 15120 - DNA, 325 bp, Glycine max
  unsure at all n locations
atcctatctccgacagccaatgggtgagtcctgtcccggtagtcccgaagaagaccggccctacagtgataaaaaatgagaaggaggagctaattcctactcgggtgcagaacagttggagagtctgcattgactatatgaggctgaaccaggttaccaaaaaggaccattntcccctgccattcattgactagatgctngaacgactggcangtaaatcccactactgtttccttgatggttnttctggttatatgcaaattactattgctcctaaggatcanganaggaccacattcacctgccccttcngcacttttgccta

SEQ ID NO: 15121 - DNA, 341 bp, Glycine max
  unsure at all n locations
agcttatctttttgaagtctgtaagatggtatgtcttattgactntgttagccttaagaacttgttcatttcttgttgttaccaaaattctgctacctgatccaaaatggtcaagagctattttgttctaagtgatgtaaatcattcacgtcatcaagaacaataagaaccttcatatggccaattctcctaacaatatctttgggtaactgcatccacgtcatatcctagtagtgtagaaaatatttttttcttcaaagaaattattccatgtttctttgattcttctctttcatgggctaaaaaataacaaccatcatattcagaccgtaacttttcta

SEQ ID NO: 15122 - DNA, 392 bp, Glycine max
  unsure at all n locations
agcttgtattactaccataaggaaagaaagtaatgggtgtctacaaacaatatggatgaggcaggtaacgttgtcagaaacaagacaagattggttgccaagggttactcacaacaaaaaggtgtagactatacaaaaacctttgctcttgttgcttgtctagaggcaatatacattntactctcatttgcatgtcatacaaaaatgagactatatcaaatggacgtaaaaaatgcattcctcaatggagtaatataagaagaagtctatgtagaacaacccactgngtttgaaagtaacactgttccacacatgtgttcaaactctataaaacattgtgtggacttaagaangctccttgagcttggttgaacatcttagttcatttcatg

SEQ ID NO: 15123 - DNA, 399 bp, Glycine max
  unsure at all n locations
agcttgcataatggattcagcgatgtctttctatggggggcaggataaccctcatcaattctgtcccaacagccctccctatctaccttctctcttttttcagaattcctaaaaaagtgatacataaggtagtttctattcagaggaactttntgtgggggggtggttctgaaacagctaaaataccatgggtgatctgggatattgtttgtcttcccaagactaaaggagggttggggatcaaagaattgtctaagtttaatgaggccttgattggtaaatggggatgtgatctggctaataaccagaatcagctttgggctagagttttgatgtccaagtatggtgggtggaatgctttatgttttggaagaaacagtgcagaatgctccccttggt

SEQ ID NO: 15124 - DNA, 354 bp, Glycine max
agcttgcatattggaatcagcgatgtctttctatggggggcaggataaccctcatcaattctgtcccaacagccctccctatctaccttctctcttttttcagaattcctaaaaaagtgatacataaggtagtttctattcagaggaactttttgtgggggggtggttctgaaacagctaagataccatgggtgatctgggatattgtttgtcttcccaagactaaaggagggttggggatcaaagatttgtctaaatttaatgacgccttgattggtaaatggggaatgggatctgctaataaccagaatcagccttgggctagagttttgatgtccaagtatggtgggtgga

SEQ ID NO: 15125 - DNA, 273 bp, Glycine max
  unsure at all n locations
aaattaactcgaaagagaggttttcttagatacaggggaaaaagtctctctataatcgattccttctctttgagtgaatcctttagcaacaagtcttgtcttatgtctctcaatgttgccttctaagtctttctttgttntgaagacccatctacatctgatggcttttacaccaacaaccaactcaacgagatcccaaacttggttagatgccatagaatccatctcatccctcatagcattataccacannattgattccttagaactcat

SEQ ID NO: 15126 - DNA, 362 bp, Glycine max
agcttctatattcaatttcgagcttttcgatatattacgggactcaatcggacatccgagtaaaaagttattgtagtttgaatatgctcagggcttcggtattccatttcgagcgtctcgatatattacgggactcaatcggacatcagagtaaaaagttattgttggttgaattttctcagagcttcagtattccatttcgagcatctcgatatattacgggactcaatcagacatccgagtaaaaagttattgtagtttcaattggctcagggcttcagtattccatttcgagcgtatcgatgtattacgggactcaatcagacatgcgagttaaaagttatcgtcgtctgaatttgctc

SEQ ID NO: 15127 - DNA, 350 bp, Glycine max
  unsure at all n locations
ttctnttcttagtcgtctgtaaggatgattgngtgttagaaagcggcgatgcctactgtagactgtttttctcccatgtttcagttgtatgtaacttgtattttcttcacagatggggcatgcatgatgacccttaacactgtaaccgctgagatttccatatgctggaaagtcattaatggtacaaaaaagcattgcacgcatttcaaacgtctctttgcgaaacgcatcatacactacaaccccctcgtcccacaactttctcagatcttcgaccaacggacttagataaacgtcaatgtcatttcctggctgtcttgggcccgatatcatcatacacaacattctgt

SEQ ID NO: 15128 - DNA, 409 bp, Glycine max
agcttttatctatcctttttagctactaattaacttttcagtttgcaattagattttcaactaattttatcgaatataacctatatctcattttaaaaaatataaaacaataaaagagcatttgtttcataaaatctttttacatttattaccaaaaatataacaagggaatatcatttccttgtatttaaaaaatcgtttggttacatttttatattattgagaataatttttgaaatttaaaataatttagataaaaaataaataaaaagaagtttcagacgtattagacaataaattctcacattctcatgaaaatatcactttctcaccctcctcatgggaatataaatattagagaatataataaaaaaattataacattaattctcaagaatcaataatacca

SEQ ID NO: 15129 - DNA, 394 bp, Glycine max
  unsure at all n locations
tttctntattatgctccatgantctactntacaaaacagataaacatacatgcgaatgttaaactgatgacagtgacactgaataaatttagaatgttaaactgctacttcacttcatgatgataatgtttatctttcttgtatttttaaacaatttatctactatgtaaatatattatcaatgtgtaatctattttaattggcacattagttttcattttattcctactttataaatcagataaacatacatgcaaaattttttacaaacaacccgtgtgtacgcacgggttgccaactagtgtacatatataaaatgagaagtgtggggttagttctgaaatataaacagaaatggatggggtattttgggaaaaattattttagaataatg

SEQ ID NO: 15130 - DNA, 267 bp, Glycine max
  unsure at all n locations
tctcaacaagagaccagagcctccattcagagcttnctttatctatgggacaatnggctacacagttaaatcaacaactgtcccagaattntgacagattaccttctcaatctgtccagaatcccaaaaatgtgagtgccattacattgaggtcgagaaagtagtgtcaaggacctcaaccagcaacatcttcctcatccgcaaatgaacctgcccaacttcactctactccagaanaagatgatgacaaaaatttaaagagtaagt

SEQ ID NO: 15131 - DNA, 388 bp, Glycine max
agctgacttatctcccatggctaccaacgatctgattcggatcattctcttttcttgcgcataaccggctccacaattaccatcctcttagtatatgtagacgacataattcttacagggaacagcttgacggagatacaggctataaccactctgttggaccaagagtttcgaattaaagaccttgggaacttgaagttctttctggggctggagattgctcgaacctctaaaggaattcatctatgccagcgtaagtatgtattagatatcttatctgaatcaggcatgttaggttgcaagccgcattcaacaccaatggattattcaataaaactacaaaagagctcgggtaaccctcttccgaacgagtcttcttcctcttatc

SEQ ID NO: 15132 - DNA, 329 bp, Glycine max
tggatgcaaaagtttattatgactatggttatgatgactacaaatgatacacaagtctcaagagaatcctgcggtccatatgccctgttgagggaagggacaataaatctgcacccttggattttcaaaccccaaaaagatttggcaatcactacttcataaacattcttgaagggaaagacttgttaggttctgacaatgttcttattagccatgacttacttggaaagattacagagcaggtgtgggattatgcctctaatgaaaaaatcttgtctgcttcatttgctaaatctatgattaggatgggaaacatcaatgttcttact

SEQ ID NO: 15133 - DNA, 351 bp, Glycine max
  unsure at all n locations
agcttctatataaggttcgttcctaatatctctacaatttcatcacctctcaatgagctagtgaagaagaatgtgacatttacctgcggtgaaaaacaagagcaagcctttgctctgctcanagaaaagcttactaaggcacctgttctaactcttcctgacttttctaaaacttttgagctaaaatgtgatgcttctggagtgtgagttggagctgttttgttgcaaggtgggcaccctattgcttattctagtgataaacttcatggtgcgacccttaactaccccacctatgataaagaagcttatgccttaataagagcactccgaacttgggaacattaccttgtt

SEQ ID NO: 15134 - DNA, 338 bp, Glycine max
  unsure at all n locations
agcttggatagaagggtgaccatgagagcgtttggagctgaattaatcctcactgatccagccaaaggaatgggaggaacagtatagaaggcttatgaactnttggaaaacacaccaaatgctcacatgctgcaacaattttcaaaccctgccaatactcaagttacctgaacctaaattactattgctgtttgaaatctcctaccaagacagaaaaatcagtagaactaggctngtattatgcttgtgtgatgcttcattgtacttaaagttaatactagaatatatgtctaacatagatgcttggctgtacaatggtgcatttatttattaaatga

SEQ ID NO: 15135 - DNA, 405 bp, Glycine max
  unsure at all n locations
agcttaattgcactattcaatggagttgacaagaacattttcagactgatcaacacttgcacagtggccaaagatgcatgggagatcctganaatcactcatgaaggacctccaagtgaagatntccagattggcaactcttggctacaaaattcgaaaatctgaagatgaaggaggaagagagtattcatgacttccacatgaacattcttgaaattgccaatgcttgcactgccttgngagagaggataacagatganaagctggtgagaaagatcctcagatccttgcctaagagatttgacatgaaagtcactgcaatagaggaggcccacgacatttgcaacatgagagtggatgaactcattggttcccttcanacctttgagctaggactctcggatg

SEQ ID NO: 15136 - DNA, 370 bp, Glycine max
  unsure at all n locations
agcttgagtcttttgttaatggcgacatttatagcatgaatagtggtgtgtgtaaccaacaagtcatcaactacttctgcctgagaggtaccctagaggtactggggtattgacgatgggagcttcccatatagtggcttcggatatttgaaataccagtgctcagatgaaccaatgtattgtatgaccactccgtataggaagatacttgaaccactatgatggtcgatcatggacaaacgaatggaagtattgctctaaaacatggttgacgacctccatctgtctatcgatctgnggatgataagcagtgctcatccatagcttcgtcccacataagcgaaagagttcccgccaataggcacttatg

SEQ ID NO: 15137 - DNA, 209 bp, Glycine max
tgcttgctttctctggaagctcctaatagctcccacactatttggggtgggccattctcggatggccttgattaactcacggaccacttggaccccatttctaccaactacacaacctgagaagactatattatctacacaaaaagtacactactgtatattagcatacagggagtttttcctatcgactgacataacttgtctgacat

SEQ ID NO: 15138 - DNA, 253 bp, Glycine max
  unsure at all n locations
tactcaagcctgttacctccttcttcactacatcaagagggaccttgttgtttcttctctgnggctgnctaatgggtttagccccatcctctaaaagtatccgatgcatacatgtgaatgggctaataccaggaatgtccgccagggtccagcctatagccttcttatgcttcttgagaactgatgacaacttctcctcttgctcatcaacaagggaggcagatataattactggaaaacttttgctctcatc

SEQ ID NO: 15139 - DNA, 376 bp, Glycine max
  unsure at all n locations
agcttatgtctganatatttacaatagacctcctcagcctcagcagcaaaatcaaccacaacagatcaaatatgacctctccagcaccagatacaaccctggatggaggaatcaccctaatctcagatggtccagccctcagcaacaacaacagcagcctgctccttccttccaaaatgctgctggcccaagcagaccatacattcctccaccaatccaacaacagcaacagccccagaaatagccaacagttgaggcccctccacaaccttccctcgaagaacttgtgaggcaaatgactatgcagaacatgtagtttcagcaagagaccagagcctccattgaatcaacaacagtcccagaattctgacaagct

SEQ ID NO: 15140 - DNA, 360 bp, Glycine max
  unsure at all n locations
agccttgttaagtgatcatgggggtgaattcaaaatgaggaattcgaaactttntgtgaagaaaatggtattaatcacaatttttctgcttcaagaactccttaacaaaatggagttgttttgagaggaaagatagatttctttaggaattaacaagaactatgctaaatgaaaaccacctacctaaatacttatgggtggatttcatttgtacaacttgttatgttctcaatacaatgattataagaccgattntganaatgacaccttatgaggtctacaaaggtagaagcctaaatacatcacatcaaanagtctttgggtgtaaatgctttgtgttaaacaatggtaaataatcac

SEQ ID NO: 15141 - DNA, 227 bp, Glycine max
tgctgattggttcaacattccaggtgtctttgacctcttcactttctaagatgttccttcccctcaaggcacccctgccaaactaggcacatctgtcataggattcaccctccatgactttgcagatataatcttccacaacaatgagaattacacgcagtcatggcacatggatggatctagcttctatgttgttgggtaggacatctatttttattatttattta

SEQ ID NO: 15142 - DNA, 410 bp, Glycine max
  unsure at all n locations
agctgttgttcaagatctctatttatctccgaaacccagctgagcaagcatatagtctaagaacgcccaacttatcgagttgtatgcttttctgaagtctactttaaattaaaaacaattccagtgaaatctttgggcccaatccaccacctcattcatgatcatcacgccatcaaacatttgcctactaggaatgtangaaaattgaacttctgatataacagatcccaagaccttcttcattcgtgtggacaacaacttagatatgattctgtgaagactccctantagtgataagggtaaaaaaatttgacatagactatggattcttcttctttggaattaaagcaatacatgaataaaccacagatttgggaagagaagcatntaggtaaaattcttgcacacat

SEQ ID NO: 15143 - DNA, 371 bp, Glycine max
  unsure at all n locations
accttgctatcccatggaagctcctaatatctcccacactttttggggtgggccattcttggatggccttgattttctcaaggtccacttggaccccatttctaccaactacaaaacctaagaagactatattatctacacaaaaggtacacttctctatatttgcatagagggtgtttttcctaaggactgaaagaacttgcctgagatgtcctaagtgatcatctangctcctactgtacactaaaatatcatcaaaataaacaactacaaatctacctatgaaatccattaagacatgatgcataagcctcataaaggtgcttggtgtgttagtgagcccaaaaggcatcactagccattcatacaaa

SEQ ID NO: 15144 - DNA, 365 bp, Glycine max
  unsure at all n locations
ntttctctgtacacctacattcctatacacaaaatattttttctctatatccacacgcattgaacaactctttctctttataccaacatggtctatataaaacctctattccttttcaaagatttctttttcctttttcaatatacactcgttatttatacaaaaaatttctttatatacactcattgctcatatacaagaatttcttttcacacattgtttatatacaaaaaatctttgcacacatgtgttatatacaaaaactcttatcacacatttttttatatacaacaacccttttcacacattgtntatatacaaaaaatttcttttcttttctttatatacagatatgacattttgtt

SEQ ID NO: 15145 - DNA, 431 bp, Glycine max
  unsure at all n locations
taacacactctccactgttggtccttattttattgagaattataaaatcagaataatgactcatcatatgagtagttggacctgtaaaatttgtgatttttaagaaatttgagccaacaaaaaagagtgttcaagagaatgtgttagagacagtgttgctaccatttctctgtttaggaatggtgtttgtagttattagtgaaaatagaaatagaaaatattttccttatgtcaaacaggcttctgcattactatttttagtttttacaacattatgatagatcattatatattttttctttctctaaaacaaatgatttgtttattgtcttgnggtggtgtatataaaaactgatcaacacantttacttttctttttttgcctgttcattccaatgtacaaatgattggcttatgatgcaacaaaatct

SEQ ID NO: 15146 - DNA, 361 bp, Glycine max
  unsure at all n locations
aagcagnactccttgggcctgagatgctacaacaaattaccgaacaagtganattgattcgagagaaaatagaagcatcccaggataggcagaagagctattatgaccgaaggacaaagccattagattttctagaaggagaacatgtngtttttaaggtttctcctgtaactggagtcggaagagctctcaaatctaggaagctgacgcccaagtatctgggtccgtatcaaattntgaagaagggtgggcctgtagcttatcaaatcgctttacctccgagcttatcgaatttgcaccctatgtntcatgtctctcaactgaacgatacaacccggatccatcacatgtactcgcactg

SEQ ID NO: 15147 - DNA, 428 bp, Glycine max
  unsure at all n locations
atgcctaatcatttccaatgttatttttatctctactgagttttaaaagattggctaagattttgttaaaacataagcacttagacaatgaaggaaagctggagttgctgcacatgatgtccaacgttatgtcaaggaataagatcgggctacacaatgcacaaggcaagataaaatgtcaaatgaagaattgaagttgcaggatccacgatgtcggatacaatgtcctgacatcctgcccgaanatactggagttgttgcacaatgcataagtcaagataaaatgtcaaatgaagcattgaagctgcaggatccacgatgtcggatacgatgtcctgacatcttgcccganaatactggacacataaatctgttatatctttaacagattattgtgcagttagcaaaagattagatgatctatcttt

SEQ ID NO: 15148 - DNA, 295 bp, Glycine max
  unsure at all n locations
catggaagctcctaatatctcccacactttttagggtgagccattcttggatggccttgattntctcaaggtccacttggacctcatttctaccaactacaaaacctatgaaaactatattatctacacaaaaggtacacttctctatattttcatagagggtgtttttcctaatgactgaaagaactagcctgagatgtcctaagtgatcatctangctcctactgtacactaaaatatcatcaaaataaacaactacaaatctacctatgaaatcccttaagacatgatgcat

SEQ ID NO: 15149 - DNA, 362 bp, Glycine max
  unsure at all n locations
aactcaagcttatgggaaggcccatttgcctgagagagctgtgtacttgtttcacagaatgnggggtgagtngcagtgcaaacaaaccgtgaaatcattcaattctgttctcaatgtgattggtcaagagggtctcttcaatcgtgcattggagttttacaatcatgttgttgcatccaagagtttgaacattcaccctaatgcactcacttttaatttggtcattaaggccatgtgtaggcttggttcggttgataaagcaattgatgcttttagagagattccactcaggaattgtgctccggataattatacctattcgacattgatgcatgggttgtgcaatgaagagagaattgatg

SEQ ID NO: 15150 - DNA, 456 bp, Glycine max
  unsure at all n locations
tactcaagctggtcccaacgctntgttcaggctctcccaaaatctagatgtaaacctagtatctctatcagacactatgctagatggcacaccatgtaatatgacaatctcactaatatacagagaggtcaacttttccaaggaaaatatgatattaatgggaataaagtgagcagacttggtcagcctgtcaacaataacccagatagaatcaaaacctttgggggttctaggtagtcctacgacaaaatccatagaaatattgttccatttccactgggtatctccaagggttgtaacttccctgaaggtctctgatatcttagccttctgacagactaaacatgcatacacaaactcactaacctctctcttcatgttgggctaccaaaacatcatcttcagatcttgatacatcttggtagcaccaggatggatgctcaaactactcctatg

SEQ ID NO: 15151 - DNA, 377 bp, Glycine max
  unsure at all n locations
agcttaacattcaatttcgggactcaatcagacatcgtttgaattgctattagcttttcattcaatnntgagcatctcactatattacgggactcaatcagacatccgagtaaaaagttattgtcgtttgaattggctcataggttcaacattcaatttcgagcgtctcgatataatacgggactcaatcagacatccgagtaaaaagttattgtcgattgaatcggatcagagggtcaacattcaattttgagcgtctcgatatacgaaggaactcaatcacacatgcgagntaaaagctattggcgttcgaatatgctcagagcttcaatcttcaattacgagcgtccctttatattacgggactcaatcaatca

SEQ ID NO: 15152 - DNA, 363 bp, Glycine max
tgtctgtttcagaataaacataaaacatcctgtcactatcttttccagaacgagcaaccccaaaatcgaaaggtaatcttgggatttcagtccatttatttgacacagaatcatatatttctccagagtccagaggctcatcccaagatcccagacctccaacagctatcaacaaaaatcttttactgccctttgagcttgaatgctcacttttttgcctaaagaatttgtatgtctttcgactgggcagagacaaagcttcagtctcattaaaagcaggtctgcaatggcgtctcattgaaagcttgtggggatcctcatatacgtctgaaaccccaccaatccttgatcttggaaaacgtc

SEQ ID NO: 15153 - DNA, 457 bp, Glycine max
  unsure at all n locations
tactaagcttataatatttgctttgtgcacggcagacaccttctttctgtanttttgtaagcatactcgaatgcatatgtagcaattcgctctgaacaaaactttgttattacctagtaaaatatgagtatcaacagcaaacataaacccatactgcatcaagacagtatcaaggtgataccttcatgacatatatacatcaaagatcacatggaaaagaagaaaaaaaactggatagaaattccaagcgaaaagaactttacataaaatgaattagccctcttgaaatcataaaatacaggaataccaaatatgttcactttcttttgctagcacgatagggaacgttntgctaacatatcaccagaaaacaatcattatttgcaaaagctctctaataaaaaataaaaacaagttatttatctatagcaagctgaatcattcaactggtaataca

SEQ ID NO: 15154 - DNA, 227 bp, Glycine max
ggcttgcttgctttggttccaattgctggaacacagagctgccactctcctcaagaaaaggatgtagaatctgaaattctgataccaatgacagatgtcgtaccggatgtcacgacatcacgcttcagaacatgcagatgatatttgacagtttgaacagattaaacaagttaataacacaagagaattgttaacccagttcggtgcaacgtcacctacatctgggg

SEQ ID NO: 15155 - DNA, 419 bp, Glycine max
  unsure at all n locations
tcgaagccctctgtttaaggctgaggctccacacctttctttggatactatctgctgagtctgcttccttcaatcgactgtctgtggagcgcgcatacaagtatcgccctgttaaggtggtggaatctgaacttccgcggcagcagtgtgtggtttacttggatctgaagcgggaggagtgcaccaatntgttcccatctggccgagtatattcacaggcattccatttangtggacaaggggtgctcttatcagcacattgcaacatggaccaacagagctctttccattgctttggcctgtttctatgaatgcangataagggctcagttagctttgcccgtgactatgagtttgctgctatgtcaaggccaacagaggaatttgttagcaagtacaaaggcaattatgtattcact

SEQ ID NO: 15156 - DNA, 368 bp, Glycine max
  unsure at all n locations
ctggcgggacatcttgacttgctttgcaaactgactttatacactttattctgccttcntctattggcagattgggaatgcctctaacagcacctttgtcaatgattttcttcatgcctcttaagtgcagatgtccaaatctttgatgccatattctgacttcatcttctttggaggatagacatgtggaggagtagctggtttcttgaggtgtccataggtaacagttgtcctttgatctgctgcccttcattagaacttcactcttctcatttgtcaccaagcattctgactntgtgaagtttacattgaatccttcatcacacaactgactgatgctgatcacgtttgcagtcagtcccttcacc

SEQ ID NO: 15157 - DNA, 259 bp, Glycine max
atccttggcccccttagagattttgtaaagatgtctgctagttgatcattagaactaacgaattcagtaataacttccttagaaaggactttctctcggacaaaatgacaatcaattcaatatgtttaagtctctcatggaatatgggataaaagctatatataggactgtctgattatcacaacatagtttcatttgttgagtatttccaaacttcaactcttgaagtgtttaatcccatgagacacatgtgactaca

SEQ ID NO: 15158 - DNA, 360 bp, Glycine max
ttttgaagataacatcatggatcaatgtatataccagaaggtcagtgggagtaagatttgttttcttgtgttatacgtggatgacattttgcttatgactaatgataagggtttgctatatgaggtgaaacaattcttctcgaagaactttgatatgaaggatatgggagaaacatcttatgtcattggcattaagatccatagggaaagatctcgaggcattttgggtttgtcttaagagacttatatcaacaaagttctagagaggtttaacatgaaatattgttcaccaagtgtagctcctattatgaagggtgacaaacttgatttgagccaatgccttaaaaaatgattatgagt

SEQ ID NO: 15159 - DNA, 440 bp, Glycine max
  unsure at all n locations
ntganaatataatatcttgatttctaaaatacttattttctctccccctttgtaaacatcaaaaaggccaaagtgcgcaaaacatgaataatttaatcatacacaaagcataatttgtaaaacaaacataaaagattctgaaacatacataaagaaaaacatgaataaaaccaaattgaaatgcaaaccacttagtcatataacacaaaccataaatatcatgttcagtcatactaagcaaatattaaaagaaatactaagttttcaaatgtcataataatatagccaaatacacggctagaaaacaaaatactaataataatagtaatgtctaaactgatagtggtggtggaggtaaattaagggagtcacgaatgatggtgaaatcttcttcaacctttgtgatccttgagtncatttcgtcgaatcgcgtgtccact

SEQ ID NO: 15160 - DNA, 265 bp, Glycine max
  unsure at all n locations
tcttgctattgcaagtaccagaatggtggttcctcagtatattgtttgggagcatggcgctatccttgctaatgggctttgtgtggaaaacggatgtgcaactgccatggtggggtatgctctttgcttttggttaggcttttattgtaacccttcctattggtgtcattcaagcaactaccaaccaggtaccatctccactattattntgatgcagagtgggaagcaatagaggtttaacattttaacactttttttttttttg

SEQ ID NO: 15161 - DNA, 441 bp, Glycine max
  unsure at all n locations
tactcaagcttagccctagaggggatgaaccttttcagtgttggagaggatcaataacatttcctatangttggacctcccagaagagtatggagtcagcatcacttttaacatttctgatntaattccttttgcaggtggagctgatattgaggaggtggaactaacagatntgaggtcaaatcctcttcaggggaaggggatgatgcaatccttcctangaagggaccagtcactagagccaagagcaagaggctccaagaggattgcgctagagctgttgaagaaggccctanggttctcatgaacctcanggtagatttcggagcccatgggccaaggttgagtccaattatctntgtgcatattagactaggatgtcattatattcgatccttgtgtttaggactccataatgtangtagggtatcctagaaatat

SEQ ID NO: 15162 - DNA, 374 bp, Glycine max
tgctcaatcagccccaactcttctctatgcttttgttttattctcactgcaacactataggattctttcaacctctcaagtgcaaggataagcagcttggtatcatgcttatatgataaaggtggaaagggaataggggagaacttcctatattccaaccaatgtacagttgttgtatagatagcaacagcttcttcaggagtaacatatggaccatctatcaaataattgagtggacgttcctgaaacacgcatcaatgatgacgaagtgacttcaattattaaaatgtctatagaactaattcaaacaacatttcgttcaaaatagtgagcctgcaaaggaatcatatcaatcatagagaacactgaacaca

SEQ ID NO: 15163 - DNA, 357 bp, Glycine max
  unsure at all n locations
ncgctattgcatttcgagcgtctggacatataacgttattttatcatacatccgagttaaaagtgattgtcgattgaatttgctcagagtttccacattcaatttcgagcatctcgatatattacgggactgaatcagacatccgagtaanaagttattgtcgtttgaatatgctcagagcttcaacattcaatttcgagcgtctagatatattacgggactaaatcagacatccgagtaaaaagttattgtcgtttgaatttgctcagagcttcggtattctatttcgagcgtctcgatatattacgggactcaatctgacatccgagtaaaaatttattgtcgtttgaatttgct

SEQ ID NO: 15164 - DNA, 253 bp, Glycine max
caatacctttttacaggaatgtctgattgagtcctgtcatatatcgagacgctcgaaatggaatgttgaatctttgagccaatccaaaacgacaataactttttaactcggatgtctgattgtgtcccgtaatataacgagactctcaaaattgaatggtgaagctctgaactaattcaaacgaacaataacttttaactcggatgtctgattgagtcctgtcatacatcgagacgctcgaaattgaatgttg

SEQ ID NO: 15165 - DNA, 439 bp, Glycine max
actcaagcttaacattcaagtttgagcgtctcgtaatattactgtactttatcatacatccgagtaaaaatttattgtcgtttggattggctcagagattcaacattcaatttcgagcgtctccatatattacgggactcattcagacatccgagtaaaaagttattgtcgtttgaattagcttagagcttcaacaatcaatttcgagtgtctcgatatatcacgagactcaatcagacatccgagtaaaaagttattggtcgttgaattggctcagagcttccacattcaattttgagcgtctcaatatattacgggcctcaatcagacatccgagtaaaaagttattgtcgcttgaattggctcagagcttcaacattcaatttcgagcgtctcgatatgtgacgagagtcaatcagacatccgagtaaaaagtatt

SEQ ID NO: 15166 - DNA, 239 bp, Glycine max
tgttttgatccagtgacattattacaacaacaatagtcctacatactacatgcccttatagtttacaagatgtgtcaactggatccaaaaccatagcagagaagaatgtaaataacatgtgaataaaaacctgaccaaccaaattgcaaatatgaatttgctggtgaagataggggtagtcactataagtgtaaaaccaagaaccggatcagaaatgtagaatgatctcctgtgatact

SEQ ID NO: 15167 - DNA, 407 bp, Glycine max
ggtttgctgcgattttgattcttcgagaataagaagggaacattataaataattatatcctccgatttaaaattaatctttgagttatctgcttacataatttataataacaatggttcaaattgtataattgttaattggaataattataattaatgattctatctaattgactaaatcattgctccatgtttaaatcttaaatgatggtatttatatatttatcttagtttaaattaatcttacgttccattatacaaatatatatacaattcttttttgaccaaattccagagctaagtcttgtttgtcactaactcactataattgaagataacatgatgaatgaaataaaaacatactatattcttaatacattggtgctttcaatcactcataacttttga

SEQ ID NO: 15168 - DNA, 449 bp, Glycine max
  unsure at all n locations
tttggcatggatatagctcctatgttatggtaacacactanaattttgtgaatatttgcatgtcagtattttcatccttgtatgttctaaatgagatatataatctaagaatatgagtttagaatgtgcagaagcaaaaatatatggcttgaagaggttgacaaattattaattatgttcatatataacactatatctatcatgtttaaataggttcttgaactatatttattgtttaattaagtccctattggatctttgttggaccacaagttaaagaatcctatactagaattaatacactaataactaataatctggaaaaagttcaaaaacctgctgaataattaaactttgttaatcatatcgcattgtgtattatatttagactttactctcatttctcttctctataaatatctaataacagaggtgtacaagaacttggg

SEQ ID NO: 15169 - DNA, 377 bp, Glycine max
  unsure at all n locations
gctgccactctcctcaagaaaaggatgtagaatctgaaattctgataccaatgacagatgtcgtaccggatgtcacgacatcacgcttcagaacatgcagatgatatttgacagtatgaacagattaaacaagtaaataacacaggagaattgttaacccagttcggtgcaacgtcacctacatctggnggctaccaagccagggaggaaatccactanaatagtgttagttcgaagatctaacaaccactgtttacaaccttctcacctaaccactacccatgcaacctctacctaagagccactcttagatatgagaacacctctcactccctctcaatcactctcccgtggttaccaataaatcanagacacac

SEQ ID NO: 15170 - DNA, 160 bp, Glycine max
  unsure at all n locations
gaccatgggagncctcaagagcttccgttgttcaatttcgagcttctcgatatgtgatttgcctgaatcggacatccgtgtgaaaagttataccaattgaatttctcaagagcttccgttgttcagttttgaacgtctcgatatgtgatttgcctgaatc

SEQ ID NO: 15171 - DNA, 371 bp, Glycine max
  unsure at all n locations
ttcatgcaagctttgccttantttctaagagctcgacaatggcgggtgtcggaaaccgatcacgcaccgtgattgcatttaaagctctgtagtccatgcaaaagtgccatgaaccatcctgcttgcgaactaggagcacagacaagaaaggtcctttctagagcattgattcaacctgcgattcaatctcatgtttctggtaatgtggataacgataaggccgtacgttgactggcgcagctcgcggcaggaggtggatgtggtggtctgtatccaggccggtggcactgaataaaggggctgatataatgcaagaaaatgatcaatctaagatcggatccgtgggtggggagacatacccatctggggtg

SEQ ID NO: 15172 - DNA, 323 bp, Glycine max
tctttcttgaagactaactggatgcgtcggtcaacttggtaacccagctggccttgaatcacaaatctgtacctgtcgcaagggtttgtggtttgtgctcctctgctgaccaccatacagacctttgcccttccatgcagcaacctggagcaattgagcagactgaagcttatgctgcaaatatttacaatagacctcctcaacctcagcagcaaaatcaaccacagtagagcaattatgacctttccagcaacagatacaaccctggatggaggaatcaccctaacctcagatggtccagccctcagcaacaacaacagcag

SEQ ID NO: 15173 - DNA, 420 bp, Glycine max
  unsure at all n locations
agctttgtattgtagaaagtgtaagacacccttatgttggttagagctcggagaagacctcaccttacgacctgaagcggtacaacaaaccaccgagaaggtaaagttgatccaagaaaggatgaggactgcttagagtaggtagaaaagttatcaagataagaggaggaaacacctggaattcgaggttggtgatcatgtattcttgagagtcactccgtggactcgggttggtcgagcattgaaatctcgaaaactcacacctcattntataggtcttttcctggaattcaaaatgacatctccttttagtagaatctgaaacacccctcagccctttatgttttgacaaggggtattgactccgaatgttgtcattaaccttatttctganaatctatactaaatatcctttaattt

SEQ ID NO: 15174 - DNA, 398 bp, Glycine max
  unsure at all n locations
agcttggctctgtgccatcanaaccttctcattcttaagttcctcaacctttaaacagacatttcggtcaagtaagtgtttttctgaatcaaacagatcaaacttgatcttctgatcatctatgcccgtttccagtttaccctttctcatatccaccacacaatcggcggttaacatgaagggatggcccanaatcaagggaattttancgtcctcttcaatatccattacaacaaaatctacagggaaagtaaaatgttgcaccttaaccacaacatcttcaattatgccataaggccttgtaatagaccgatctacaagttgtagtgtcattctagttggcataatctccaactcttcaattctcctgcacatggagagaagcatcaaatgtatat

SEQ ID NO: 15175 - DNA, 413 bp, Glycine max
tcttcttcagcatcttttcttggctagaaacatgctctctggcaagtttcccttggagttactcaactgctcctcaatccaacagttggacctttctgataacagctttgaaggagaacttccttccagcttggacaaactgcagaacctcacagatcttgtgctcaacaacaacagttttgttggatctttaccttctgaaattggcaacattagtagcttggaaagtcttttcctatttggtaacttcttcaaaggtaatattccgttggagattggaaggctgcacagattgagctccctttacctctatgacgaccagaattctggacccataccaatggagttaccaactgccaagcttagaagaagtgacttctttgaaatcactcacatggctcattccaaaacta

SEQ ID NO: 15176 - DNA, 297 bp, Glycine max
  unsure at all n locations
tttcttgtatgtgtttacatttcaagtgcatatatagctntagcccaacacttgttttgatccagtgacattattacaacaacaatagtcctacatactacatgcccttagagtttagaagatttgtcaactggatccaaaaccatagcagaaaagaatgtaaataacatgtgaataaaaacctgaccaaccaaattgcanatatgaatttgctggggaagaaaagggtagtcagtataagtgtataaccaacaaccggatcagaaatgtagaatgtctccctgtgatactgttgag

SEQ ID NO: 15177 - DNA, 435 bp, Glycine max
  unsure at all n locations
cggacttcctgtgttctgagaacctctcctttctcaagtgtactttaacccaatcacctggttcaagcacgactgtctttctgcttttgttggcttgccttgcatagctcgcatttttcttttcaagttgagccttcacttgctcttgcaacttcttcacatactcagctttagcctgtgcatccttatgcttaaacatagcaatgttaggcatagccaacaaatcaagaggagtcaaaggattaaatccatacattatcttaaatggtgaacaattagttgtgctatggacagcccgattataagcaaactcaacatgaggcaaacaggcttcccaagatttaagattnttctttaaaacaatcctaagcagtgtgcctaaagtcctattgactacctcagtttgaccattagtntgtgggtgacaagtagtag

SEQ ID NO: 15178 - DNA, 281 bp, Glycine max
gtttgatcagcgaactcataatggtgtacctgtcgagtaagactccttcttatctgcacaaccaaattattcaagcacagtcgataatatagaagatggaactatcacaattagtattccttcaaagaatgggaaagggcgtccatcctttaacttcaacaaagtctttggaccatctgcatcccacagttggtttggttctcagtttcagctatctccaacatcactataatttagtaaatattgaacaaatttcttctcttgtgttcaacggacgtctt

SEQ ID NO: 15179 - DNA, 399 bp, Glycine max
tgcttctcgtttattatgcgcccgaatcggacatccatttgaatagtttagaccatttgaatttctcgagagcttccgttgttcaatttcgagcgtctcaacatattatgcgcccgaatcggacatccgtctaaaaagttatgccatttgaatttctcgagagcttccgttattatatttttagcatctcgatatgtgatgcactctaaaaagttatgccatttgaatttctcgaaagcttccgttgttcaatttttagcgcctagatatgtgatgcactctaaaaagttatgccatttgaatttgtcgagagcttccgtggttcaatttttagcatctggatatgtgatgcgtgtgaatcggacattcgactgagaagttatgaccatttgaatttct

SEQ ID NO: 15180 - DNA, 333 bp, Glycine max
  unsure at all n locations
agcttctagatgatttatgtctgcgaatccgacatgctgtgagaagttatgaccatttgaatatatcgagcgctgccgaagttcaatcacaagcagcatagatatgcgcatgtactcagattagacattagagcgaaatgccatgaccatntctaatagagctgagagctatccgatttttaatcatctagcgtctgagatgagttatgacacacgaatcgacacatctagagtgaacaagagctgaccattgcgaatttgtcgagagctacatatgtgaatctctcaacgtagagatgacttatgaatccgaatagaacatccgtgtgaaaa

SEQ ID NO: 15181 - DNA, 448 bp, Glycine max
  unsure at all n locations
atctctaagtcacctgcagcatgcaagctgtcctttttgacanatactccttaccaaatagaatccatcttggccctttttccacaactctcgtanatgggagagaaaatgtcatctaaagcataccaagtcctaatattatcaaatnctaaaaattgagctccttaggagaaaaacaatgtgtgtctcctagagacggcatcagctaccacatttgtttttccatttttgtatttgataacatatggaaatntctctangtactctacccattntgcatgccttttgtttaactntctttgccctctaatgtacttaagtgattgatgatcactatgaatgacaaattcctcggaaacaaggtaatgttcccaagtntggagggctcttattaaagcatanagctctttatcatagatgggtagttgagagtgttcccaagtaatgt

SEQ ID NO: 15182 - DNA, 391 bp, Glycine max
  unsure at all n locations
agcttcacacttgatatttggagacacatgnaacagcgcctgggcaatgacactcatggtgctccgaacaaaggtggagtatggaggatttccttgagggtccgcgcttaagcaatcatgaaacccagctccaaactcgaaagtggaggacacatgaacaaccctaagcaataacattcatgtggctccggaacaggatgagaatggaggattgccttgagggtcctctcttatgcaatcatggaacacagctcccagctcaaaaatggaggacacatgaacagccctaagcaataacattcatgtggcttcagaaaaagacgacaatggacgattgccttgacggtcctctcttaagcaatcatggaacacagcctcaaggctcaaaatg

SEQ ID NO: 15183 - DNA, 328 bp, Glycine max
  unsure at all n locations
agcttttgcattctggaatcattnatcctatcttcgatagcgaatgggtgagtcccgtccaggtagttccaaagaaaaccggtctcaccgtgataaagaatgagaaggatgagctgattcctactcgggtgtagaacagctggagagtatgcatcgactaaaggaggttgaactaggttacgcaaaatgacccatatccactgccattcattgaccacatgcttgaacgcctagcaggtaaatcttactactgcttccttgatggtctttcatgtcacatgcaaatcactattgctcctaaggaacacgagaagatcacattcacctg

SEQ ID NO: 15184 - DNA, 387 bp, Glycine max
  unsure at all n locations
agcttccttatgaagattcctaaagaagctagagcttagctacacatacctctctaatagctaagctcacctccttgagatgagaagctagagcttagctacacaccccatatagtagctaagctcacccctatgacaaaatacatgagaatacaaaaaaaatccctactacaaagactactcaaaatgcctcgaaatacaaggctaaaaccctatactactagaatggccaaaatacaaggcccaaatgaaggaaaaacctattctaatatttacaaagataagcgggctcatacttagcccatgggctcgaaatctaccctaaagctcatgagaaccctangggccttccttggatctctgacccaatctacttggagtcttcta

SEQ ID NO: 15185 - DNA, 321 bp, Glycine max
gcacgttctctccttcagaggactacacgttctcaccttcagattactacacgtgctcgccttcagaggactacacgtcctccccttcataggactaaaagtcctccctttcagaggactacacgtccacgccttcagagttctacacatcttcgcgttcagagggctgcacgccctcatcttcagaggactacacgtcctggccttcagtgggctacacgtcctctccttcagaggactgcacgccctcacctttagaggactacacgtcctagcgttcagagggttaaacgccctcacctttaaaggactaaacgtcct

SEQ ID NO: 15186 - DNA, 429 bp, Glycine max
  unsure at all n locations
agcttgttgtttttaagattacatctatacaaaggaatttttgatggggcagcctccaagactccattaagattccttgggtgaggtgggacatagtctgcctacctaagagtaaaggtgggttagggatcaaagatttgattaaattcaacgaggctttgcttgctaaatgggggtgggagttggcaaataatcagaatcagttgtgggccacaattctattgtgtagatatggtggttggagggatttgatttctcatangaactgcagtttagactctccttggtggaaagacctcaaggttatcttcaagcagcagcaaagcaacacaatttgtaaaaatagctctattttgcccatangtaaggacggtccatggaatacaaaccaagtacttattggcttgcaacaaaaaaacactcattgga

SEQ ID NO: 15187 - DNA, 408 bp, Glycine max
  unsure at all n locations
agcatgacttacgcctattaatctttgttcggttttgaatgcaagagggcatgaatattatgacatgtttgagaggttttttattacaatttaaattggctgcctcatgaggaataccttgcacctatgtagcatggaaaatacctttcaatggtatgtatatatgtgaatatatatagcatggaaatgccttgcaaagtgtgtgaatatatggcatatatataccttgcaaagtgtgaatgtatagcaaataatgaatttcaaaaatctgtatatgtaagataggtagcgtaaaaaatgcctttcaaaatatgtatatttgtgggtaggtagcataaggagcctttcaaacaaaatgtacccatggcaaanatggcacgagaatgcttcccaaatgaatatatgatg

SEQ ID NO: 15188 - DNA, 401 bp, Glycine max
  unsure at all n locations
agagatgantgaagggagaggaagagaagagtttgaaattttgtgctctaaaaaagctctgaaatctgaggtttattattcaaaggatcaaagtggaaaaaaggccacaccatgaccttttttatagcctaagtgtcacccaaaattggagggaaattgaaatttcaattcaaatttcactttgaatttgaaattgattttgtggaaccaaacttggagccaaaattcactaatatgattagtgaattttagtatgattcagcccactaatccaagattctccactaagtgtgcttaggtgtcatgagacatgtaaagcatgaaggacatgcacaaagtgtgactatatgatgtggcaatggngtgtagtaagcaaatggctcacctcccctctaaaattt

SEQ ID NO: 15189 - DNA, 413 bp, Glycine max
  unsure at all n locations
agctttaattttcaattacgagcgtctcgatatataacgggactcaatcagacatccgagtaaaaagtaattgtcgtttgaatttgctaagagctgcggtattcaatttcgagtgtctcgatatattacgggactctatcagacatccgagtaaaaatttattgtcgtttgaatttgctctgagcttcaacattcaatttcgagcatcccgatatattacgggactctatcacacatccgagtaaaaagttagtgtcatttgaatatgctctgagcgtcaacattcaatatcgagcgtcttgatatattacgggactcaatcagacatccgagtaanaagttatggtcgcttgaatttgtccagagatacaacattcaatttcgagcgtctcgatatattacgggactcaatc

SEQ ID NO: 15190 - DNA, 334 bp, Glycine max
  unsure at all n locations
aataacnntttttactttcggatggtcgngaaattgagtcacagtaataatgtcaaagacgcctcgaaatatgnnnataccgaagctctgagcnaaattcataacgaacaatacctatttgactcggatgtcggattgagtcacgtaatatctcgagacgctcgaaattgaataccgaagctctgagcgaattcatacgacaataactttttactcggatgtgcgattgagtcccgtaatatgacgagacactcggaattgaataccgaagctatgagcaaattcaatcgacaataacattttactcggatgtcggattgagtcacgtaatatg

SEQ ID NO: 15191 - DNA, 326 bp, Glycine max
  unsure at all n locations
agctatcatacgcatgtccgatacangcgcatagcgtgtggagactctaganatctaacaaacgaagctctcgagagattcacatggtcataacttttcactcgcatgtccgatacaggcgcataacatatcgagacgcttgatattgaacaactgattttctcgagaaattcaaatggtcataacttttaactcgcatgtccgattcaagcgcataacatatcgagacgctcgacattgaacaacggatgttctcgagaaattcaaatggtcataactcttcactctcatgtgcgagtcaagcgaataacttatctagacactcg

SEQ ID NO: 15192 - DNA, 404 bp, Glycine max
  unsure at all n locations
agcttgtaattttattntccttgctagagatcaatcaagagccctcctacataaagggaaggctctcccaaaataattggaatntcctaatcctcctttatgtccatgatcacaaaatcagcttgaaaaatgaatttaccaactatgataagcaaattctccactattcctttcagataagtaatagttntatctacaagcacaagagaaatgttaatgggttgnggttcttgtaactcgaacttcttataaacaaaataaagcatcaaatcaatgcttgcaccaagatcacataaggctctatcgantttcagctcccatagtacanggaatgaaattccatgattgtgacttagaggcatttctttaaactatataagcattctcattgagccactgggaaa

SEQ ID NO: 15193 - DNA, 414 bp, Glycine max
  unsure at all n locations
tggacttcctgtgttctgggaacctctcctttctcangtgtatccaaacccaancacctagttcaagcacgactttctttctgcttttgttggcttgccttgcatagctcacatttttcttttcaatttgagccttcacttgctcatgtagtttcttcacatactcagctttagcctgtgtgtccttatgcttaaacatagcaatgttaggcataggaaacaaatcaagaggagtcaaaggattaaatccatacactatctcanatggtgaacaattagttgtgctatggacaacccaattataggcaaactcagcatgaggcanacatgcttcccaagaattaagacttttctttaaaacagtcctaagcagtgtgcctaaagtcctattgactacctcagtttgaccattag

SEQ ID NO: 15194 - DNA, 339 bp, Glycine max
ctgcaaacatttatcgtagaccccctcagcagcgaaactttcaattgtcttaaaattatgacctcacaagacacagatataatccaggttggatgaatcatccaaatctgagatgggcaagtcctccacaacaacaacagtttagccctcctttccagaatgctgctggtccaagcaagccatatgttcctcctgcaatacagcatcagcaacaacagagacaacaagcaactgagacccctcctcaaccttccttagaagagatagtgaggcagatgaccatccacaatatgcaatctcagcaagagacaatagcctccattcatagtctgacaaatc

SEQ ID NO: 15195 - DNA, 395 bp, Glycine max
  unsure at all n locations
ctaaagttccgcttcttcactcagctgttgtgtgttaattattaacttgttctttcctcttttttatctactccggtacagatgtattcgtggagctaaattaaatcctgaagatttagattgcatggtcttaagttctatctattctgaggtgatgatgatgaacaaacaagtttactgctataacatccagtcaggcagtgagcatgaggtactacaagagatattaagcactgttggatggccataaaagcaaaggcttttatctttttttttcttttcttggtntataattattctgcaacacaatatgtacatatatgtgttgtagatgctctggaaatgaccttctttgctctgaaaggtcctcttaaactatcgatttacactgatag

SEQ ID NO: 15196 - DNA, 358 bp, Glycine max
  unsure at all n locations
taagcttcattggagccggtgctgtgtatggaagataaggtgttgttgtgaaagggattgttttagttcatgggaaaactgcaattggaaggattgatgatgattctgtttgtgcaactctggattggtggcctcctcagaaatgtgactatggaaaatgcagttggggtcatgcttctctgctcaacctggtatttttcctttctttttgtcttctggttcctgaatccgtcaaaaagtttttttttcttttcagaataattagatgggttttgcttcttccttttattntttaatttataaatagcattctctgcatgatgacgcttttttttgcctctttagaatgatgctcgga

SEQ ID NO: 15197 - DNA, 402 bp, Glycine max
  unsure at all n locations
agcttccttattnatgattcctaaagaagctagagcttagctacacatacctctctaatagctaagctcacctccttatgatgagaagctagagcttagctacacaccccctataataactaagctcacccccatggcaaaatacctganaatacaaaanaaaatccctactacaaagactactcanaatacctcgaaatacaaggctaaaaccctatactactagaatggccaaaatacaaggcccaaacaaaggaatacctattctaatatttacaaagataagcgggctcatacttagcccatgggctcaaaatctaccctaaggctcatgagaaccctanggccttcccttggatctctgacccaatctacttggagtcttctatccaatgcccttgc

SEQ ID NO: 15198 - DNA, 365 bp, Glycine max
  unsure at all n locations
ntgaagcactcacatagngttgaattcttggatgaagagttgttgtctattgagagaaacaagacatggagtctcacaaagctaccaatagtaaagaaagccatagcagtaaaatgggtctacaaaactaagttgaatcctagaggataagtaacagagttcaaagccagactgagtgcaaagggatttctgcagaagcaaggtctggattatgatgaagtatttgctcctattgctaggttggaaacagttagacttgtaatagcaatggctagctataattgctgggaagtacaccaaatggatgtaaaatctgcatctcttaatggctcactataagaagaaagttttgtcactcaaccact

SEQ ID NO: 15199 - DNA, 241 bp, Glycine max
  unsure at all n locations
aattttcttcccatcagaccttggatgcaactgtgattgtatacccatattagctagatcttgacgggtattcaagccatccttcgtcttgccttgaatgttaaggagtgtcccaatcacactgtcacaaacatttttctccacatgcataacatcaatacaatgtctaacgtcaagatctcaccagtacggaagatcaaagaanatggacctcttcttccatatgcaactctgactttta

SEQ ID NO: 15200 - DNA, 320 bp, Glycine max
  unsure at all n locations
naagctcattttttgttttctcaaaaccacaagtgccccggctaatcccgccaccaaaaacaccatttgttcccagagatatgggtctttagggatgacaacaggttgaggggtctctgatcatgcacaagttacaagagacaagcccaaaccagtgagggtatcgaagatggaaccagcatagcaacaagacattgctacttgagcaccctctggtccaccatttaaagccatcgttaagtttgtcatcaaatccccaagtgagttcccccaagccaggaactgttagctcaagattgaaggacttattccacatatgt

SEQ ID NO: 15201 - DNA, 184 bp, Glycine max
  unsure at all n locations
ctgaggcacaagagaatcgacagaatatccatgtcttatcngtccatatcagctccacccgnatgtgtataagccaccagaagatgaaacagaaattgtatgccgccaaccacaagcaaccatgaccatcttgtcacactgcaacattaaacaagcaagaattaggcaaggggaggagggagag

SEQ ID NO: 15202 - DNA, 358 bp, Glycine max
  unsure at all n locations
agcnngaaattgtaatcaaangagangcgctncataaggggagtttctctggataaacaagctcttagcagttcccatttccccactccatatctnttggttgtcaaagcagccggatggctcttagatttgtcaaattcagtagcaagttcttcaccaaggcttcttccaacatgaaatgatctatgtgcctctgagaactctctggatgtgacaaatctataaggctgatctttgtctgcccagaactgctcctgatccttccatgatgttacctataacataattaatggtccaaatacaatatataactctcttttaccagtgcagacagataaaattattgagatcaatcact

SEQ ID NO: 15203 - DNA, 361 bp, Glycine max
  unsure at all n locations
agcttgaattgatcaacggaagctctcgagaaaatcgagtggtcataaattntcacacagatgtccgattcggggaaataatatatcgagacgcacgaaattgaacaacggaagctctcgagaaatttgaatggtcataacatttcactcggatgttcgatccggggacataatttatcgagacgctcgaaattgaacaaccgaagctctcgacaaattagaatggtcgtaacttttcacgcgaatggtcgattcggggacataactcatctagacgctcganattgaacaacggaagctctcgagaaattngaaatggtcatacgtttcacaccgatgtccgattcgggaacataatata

SEQ ID NO: 15204 - DNA, 439 bp, Glycine max
  unsure at all n locations
agcgatgcannagcttctactttttcaattnntgagcccgtctcgatatgatgacgaagacnntcaatcagacanntccgagtaaaaagttatttgtcgtgtttaatttggctcagaaggttcaaccattcaatgttcgagccgtcgtcgctataaattacgggacgtcatatctaacatccgagtaaaaagttattggcgtttgaattggctcatggcttcaacattcaatttcgagcgtctcgatatatgacgagactcaatcagacatccgcgtaaaaagttattgtcgtttgaattgtctcagaggttcaacattcaatttcgagcgtctcgttatgttacgggactcaatcacacgtccgagtaaaaagctattgtcgtttgaatttgctcagagattcacattcaatatcgagcgtctcgatatattatggga

SEQ ID NO: 15205 - DNA, 320 bp, Glycine max
  unsure at all n locations
tcaacatcagaccacttccagggtgttggatctacttcacatgtatatgatggggcctatgcaagttgaaagccttggatgaaagacgtatgcctatgttgttgtggatgatttctccagatatacctgggttaactttatcatagagaaatcagaaacctttgaagtattcaaagagttgagtctaagacttcacagagagaaagactgtgtgatcaagagaatcaagagtgaccatggcagagaatntgaanacagcaggttcactgaattctgcacatctgaaggcatcactcatgagttctctgcaggcattacac

SEQ ID NO: 15206 - DNA, 347 bp, Glycine max
  unsure at all n locations
cgactcatcttctccttcaagaggcgcctctggacatctttcttctatcnccattctgctnccatggatcttcaagaagcaaaggactcctttgatgaagaagatccaaggcctacgagctccacataggagctacatcagattcatgtgaattgttaatatagattcaaatgtcctccaattgtgtgtgacacttaagctataaatagaagccatgtgtgtgcatcttttcaaatgtgatcatttgagaattacaattcaaagttcagacctcatttgatgcatacaattgcatgcgtctttactacctcttcctcaacttatcttcctctaccttcaagctttta

SEQ ID NO: 15207 - DNA, 387 bp, Glycine max
  unsure at all n locations
agctttcataatatgattgctanagaagctagagctgagctacacatacctctctaatagctaagctcacctccttatgatgagaagctagagcttagctacacaccccctataataactaagctcacccccatggcaaaatacctgaaaatacaaaaaaaaatccctactacaaagactactcaaaatacctcgaaatacaaggctaaaaccctatactactagaatggccaaaatacaaggcccaaacaaaggaatacctattctaatatttacaaagataagcgggctcatacttagcccatgggctcaaaatctaccctaaggctcatgagaaccctatggccttcccttggatctctgacccaatctacttggagtcttcta

SEQ ID NO: 15208 - DNA, 235 bp, Glycine max
  unsure at all n locations
ggaaaactgcaattggaaggattgatgatgattctgttngtgcaactctggattgagggcctcctcagaaatgcgactatggaaaatgcacttggggtcatgcttctctgctcaacctgagatttgtcctttgttttcgtcttctggttcctgaatccgtcgaacaggctttttttcttttcacaataattacacgggtatcgcttcctcctttcatttcttaatttataaatac

SEQ ID NO: 15209 - DNA, 211 bp, Glycine max
agcttgcattagttgttttttttcggagagacagccactatactttgtgaacaggattgagaacagaacgactaacaaggtgtttagcattcgacagtctggattcggtgaagatgtgtggattcatttgcaaccactgtcgaccgccaacttttcttgggaagatccatatgggaataagtttttacatgcttaacttaccgatgatgat

SEQ ID NO: 15210 - DNA, 334 bp, Glycine max
agcttatatctcaccttcagctgtccctccgatctcagcgtcatcataaactcatgaagcgatacttctgcccatttgccattctggaacgcattggcagcgttgcttaccgtttgcaactacctgaagggtctcgtatccaccccgtcttccattgttccttactacgccctcatcacagacctcttgacctcccaacctcttcccttccggcggatacttcctccccacaccctatacttgagccactagccatccttgactctcgaatggacttctctgtggaccccccaactcgtttcgttcttgcacaatgggttggtcttactacgga

SEQ ID NO: 15211 - DNA, 395 bp, Glycine max
  unsure at all n locations
tcaagcttgtgtatgaaacagatgtgattaatctaaaattacatctctactgagaagaactttcctttcagatggtgaccagatcctatagcctttcaccccatcactataacccatgaacagaccctttcttgatctaggtaccaactttccttcattgacatgataataagcattgcagccaaatactcttaggtttgagtagttctctgttntgccattccagatttcaataggggttttaagtcctatagcagtagagggtgttctattgatcagaaaacaggctgtattgatagctcttccccanaaacttctgttgagaccagcattagacaataggcatcttgttctttccaggagtgttctgttcattctttcaggaactccatctt

SEQ ID NO: 15212 - DNA, 392 bp, Glycine max
  unsure at all n locations
agcttttatatattgaaaaanaaagctccaagagcttggtattaaaggctaagctcattcttagttcataatggattcaccagaggaataatggacaccacactatttagaaaggctaagataggaaatctgttgattgctcaaatctatgtagatgacataatctttggtgcaaccacagaaaggatgtgcaaggagtttcctgagctaatgaaaggtgaatttgagatgagtatgatgggtgagctaaaattcttcctangtcttcaaaacattcaaaaagatgatgggatattcatccatcaagagaacacanaaaacctatttaaaaggtttagaatggatgaagctagacctatggctacccctatgcacccttccacaatcattga

SEQ ID NO: 15213 - DNA, 381 bp, Glycine max
  unsure at all n locations
gtccatctatggattgaaacaagcctcccgccagtggtatttataaattcatgaggtcatttcttcattcagctttgaagagaatgtcatggatcactgtatataccagaaggtcagtgngagtaagacttgtttccttgtattatacgtagatgatattctacttgcgactaatgataaggttatgctatatgaggtgaaaaaatttctctcacagaactttcatataaaggatatgggagaggcatcttatgtcatacgcataaagatccatagagaaagatctctatacattttaggcttgtctcaagaaatctatatcaacaaagttntagagagatttaatatganagattgtcaccaagtgtagcttcctttgtg

SEQ ID NO: 15214 - DNA, 412 bp, Glycine max
  unsure at all n locations
agcttcagtcgtactcctatcngcangangtgtnngggatgatgtatcctcacttcactactataatcataacattgcggattgtttttaatagaagctacgaacaacagtttccatatcgcactattatatctgatatgatatgtctattcacgaaaattgattgagagctcaaaaactagtaacatcgaataataataggtcacttaatattctttattacaacatgtgatatgtttattctaaaatataaaaaaaacactaatacttttaaattattatattatttaaatttgaacatttctttaaaataatgctagcatatcggatgagtataaaatataaattatcaactagcatgtcggaagagtataaaatataaataataatgatagtatgtatcatgagtagt

SEQ ID NO: 15215 - DNA, 403 bp, Glycine max
  unsure at all n locations
agcttgnttttaatccaacctctcatggtagaagcagacacatagaaacaaggtttcactatcttagggatcaagtgaacaaagagaaactaaaagtggagtactgctgcacatttgatcaacttgctaatattttaaccaaacccctcataggggagaagtttaaaatgttaagggatagaattggcttgatgaacttaggagatcagaattaagggagggtgtganagcttaattctgtttttgagtggtgtagatttaattgtacattggatataagagagtaacagaattttaaaattctgttataagtgcctagcctaagtgtgaagggttgtactctgtttgcttgataaaaggacatacatgcatctaataatgaggatatcattcatcatttctc

SEQ ID NO: 15216 - DNA, 400 bp, Glycine max
  unsure at all n locations
atcttcgttatatattacgggactcaatcggacatccgaagtaaaagttattgccgttggacttttcttagagcttccgttntcaattttgaccgtctcgatatcctacgggacacaattggacatccgagtgaaatgttattgtcattagaatatgctgagagcttcaattttcaattacgagcatcttcatatattacgggactcaatcggacatccgagttaaaagttattgtcgttagacttttcttacagcttccgctttcaattttcgagcgtctcgatatattacagggctcaataagacatccgagttaaaagttatagtcgatagacttttcttagagcttccgttttcaattacgagcgtctcgatatattacagggctcgatcagacat

SEQ ID NO: 15217 - DNA, 417 bp, Glycine max
  unsure at all n locations
agctnctatcattatatctcgganagcaatcaagatgtgaggcatgtcagtgttggaaaccccaatagaacggaagaactcgagtttatgcaaaagggtatactctgcatcctcaagaagcaccaaaggtcgtttcttcgcaagttttgcaacctgcattatgtcaaacccatagctgctgagcatatcaataacagcgtctgggccatctgggtttgtaaaaatgaccctgtcggagacgaccttggcttttcatggcggcaccccacatgagttgatgaggtatgacacagtataggtgtcacctttgtggcggcttccatctgattcagaatcagaagagctggctgaagtgaatgaatagaagaaaacacttgaagcagtgtgtttgagttgcgacagagaacccaatgtgat

SEQ ID NO: 15218 - DNA, 379 bp, Glycine max
  unsure at all n locations
gaagatggactcaagttggtcaaactgaagggtgttgttatgcaggtaancaatatctggtacctggtctagtttcttgtctcacttcaacttatcttgcgaaataacttctgttctttatccaggatgccgccaatgctgctataagtgctatggttagtgtgataagactggactcagagaaagtccaacaatagtgtgatgcagccaatcacgaagttcctgaagctgagaaggttcaaattgccaattacctgtgcccagtaaggttcttgtgaatctaccatttataagcttaagcaaaatctgtttctagattatatataaccagtagcttgtttggaatgcttgtcttttgatagggaaactatgctgtctc

SEQ ID NO: 15219 - DNA, 413 bp, Glycine max
  unsure at all n locations
agcttgtatgatttgcaagatcatcgtccttgacaactccttgaaaattattgccatcaatccaaagagatgacaatttagagagtgatccaagactttcanatggatttccactgaatttattaatagagagatagagatattntaaatctatctcccttgagttgcggagatttcccagaaaagtcggaattattccgtcaagttgattatatgacaaatcaagttcaacgagagaagtcaaatttcccagggcatcagaaatagtcccatgcaagttgttgtcccctatgttgaggagcttgagacgatgaagaccgtataagcaatcaggtatagaagatgagaatgaatttccagacaagtcaagatcttgaagaagtgtgatgtttcgaataccaccaggaatggga

SEQ ID NO: 15220 - DNA, 448 bp, Glycine max
  unsure at all n locations
tcctaggctcattggagagtctgagatacttggaccttatcttaagtgggttcatgggattaatccctcatcaactaagaaacctctcanacctgcagcaccttaatcttggatacaattatgctcttcagatagataaccttaattggatatcaaggctatcttccttggagtaccttgatttgagtggttcagaccttcataaacaaggtaactggcttcaagtactgagtgaacttccatctctttcagaactacactnggagagctgtcaaattgataacttaggaccaccaaaaggaaaaatcaacttcacacatctccaagtccttgatctttcaattaacaatctcaatcagcaaatcccttcatggctatttaatctcagcacagctcttgtccaacttgatttacacagtaaccttttacagggagaaaatccacaaat

SEQ ID NO: 15221 - DNA, 404 bp, Glycine max
agcttgtattattattttgagcaactacaaatgatcttgatgagatttcggtgtcgcaaattccgcattacttcacattctacactaaagctccttgatcccaattcaaggtccaaattaaataatttgactgcaacaaccatcctatttggaagtatacctttgaacacagagccaaaactacccttaccaagcaaattactctcatcacatccattggttgcccgtgaaagttcattgcatgaaattgtactagatgctaatacagtagatgaactgacttcagcaggatcaccaccaccatgcctttttcttcgactacttttcagaaggaacacacataaaacaaccaatatggttgacaacattacaggcaatatgcattcgatgaaaacatatgtgca

SEQ ID NO: 15222 - DNA, 199 bp, Glycine max
  unsure at all n locations
agatgtccaaatcttgatgccatattctgacttcatcttctntggaagatagacatgtggaggagtaactgggtcttgaggtgccatagcagcaggtgtctttgactgctgccttattaaacttactctttcatttgtaccaacatgctgacttggaagtgacattgaaccttctcacaacactgactgagctgatcag

SEQ ID NO: 15223 - DNA, 440 bp, Glycine max
  unsure at all n locations
atatatattgtgctttgattaccgtgccaacatgtttgtttggtttaaactaatgtgccagcattatgtttgataggtaccctaaacccaattcattngatgtttctttnttatatgtatgttctctgacgacaaggtgacaatgtgcctttatanttttgttaaaaaatttattggtccagggtgttcttctgtgggatatggagcaacacaagaccttgacccatttttagcggacactgatggcaggggccttanattcaataacttttcctggaacaaaggtatgaaacgtgagatctangaccacaaacatatgtacatactaaaatntgttggcacagtcacctaattactactttctagtttctactttccatgttaacaatattataaaattatgttcaaccacacacactagttcttcgttatttgtccta

SEQ ID NO: 15224 - DNA, 403 bp, Glycine max
  unsure at all n locations
agctagattccgtgtgtcttctccactattctaatgacaatgaaagatggccaaattgagcataaggatgcacaagctaaagttgagtatgtgaaaagattgcatgagcaagtgaaggctcacattgcagagaacaatgatagctatgccaagcaagccaacaagaacaagaagaaagtggtacttgaaccaagtgattgggtttgggtacacatgaagaaggagacgttctctaaacaaaggaagtccaaacttcaacctacaagagatggacttttccaagtactagtgaggatcaatgacaatgcttacaagaacgatattcaaggtgagtatggaggtgatttcttcaattaatgttgctgacttgagtccattctntgcaggtggtgattctgaagat

SEQ ID NO: 15225 - DNA, 333 bp, Glycine max
  unsure at all n locations
agctntgtttcatttatggagaggttaatgaaacaacgagatgatgcgctccatgagaggttggatcaaatggagaatagagatcataatgaagacaaaaggaggacaagagggaatgatggtgttcctagacaaaaccgaattgatggtattaaactcaacattcctccatttaaaggaaagaatgatccggaggcctacttggagtgggagatgaaaatagagcatgttttctcatgccacatctatgatgaggaccacaaggtgaagcttgccgccacggagttttccgactatgctcttgtgtggtggaacaagctacaaaatgagaga

SEQ ID NO: 15226 - DNA, 389 bp, Glycine max
  unsure at all n locations
cgctatgctgcanacatttacaatagacctcctcaacctcagttgcaatatcaatcacagcagaacaatnatgacctctccagcaacagataccaatcccgatggaggaatcaccctaatctcagatggtctagcnctcaacaacaacaacaacagcctgctccttccttccaaaatgctgctggcccaagcagaccatacattcgttcaccaatccaacaacagcaacagccccagaaacaacannacagtaaagctcctccgtaaccttccctcgaagaacttttgangcaaatgactatgcanaacatgcagtntcaaaaagagaccagagcctccattcagagcttnaactaatagatgggggacattgctacacagttaaatca

SEQ ID NO: 15227 - DNA, 440 bp, Glycine max
  unsure at all n locations
ttagcactcttcttttgttagtcaaactttattgtttnaatctctcctcatctaaatcaaccaactcatctgacatcattttccaataatggtcgattggaatgtccatttgtttttgtaccctggctgattgcaaatgtatttcgaccggaagtacagcatcatgcccataagtcagtcgaaatggggtagtattagttgattccttangagaatttctacatgcccatagaacttgatctaacgtnttattccaatttcttggcttttgggcaatgtgttctttaatcaagttaattacaatcttattggctgcttcaacttgaccatttgcttgcgcgtaatatggtgttgaggttaataatcgaaagccaatattttgggcaaattcttgcatttttcgtccaataaaaactgaaccttgatcagtggtaattgtt

SEQ ID NO: 15228 - DNA, 406 bp, Glycine max
agctttcttgaaattcaaatggtctaaacttttaacacggaggtccgattcgggcgcataatttatcgagacactcgaaattgaacaatgcaagctctcgagaaattcaaatggtcataacttttcaatcggaagtccgattcaggcgcataatatatcgagacactcgaaattgaacaacggaagctctcgagaatttcaaatggtcataacttttcactcggaggtccgattcaggcgcataatatatcgagacgctcgaaattgaacaactcaagctctcgagaaattcaaatggtcataacttttcacacggaggtcagattcaagcgcataatatatcgagacactcgaaattgaacaatgcgagctctcgagagattcacatggtcataacgtttcaatc

SEQ ID NO: 15229 - DNA, 393 bp, Glycine max
  unsure at all n locations
agcagcgttanatttatattaaaagctccaagagcttggtattaaaggctaagctcattcttacttcataatggatgcaccacaggaataatggacaccacactatttataaaggcttacataggaaatctgttgattgctcaagatctatgtagatgacataatgtctggtgcgaccacagaactgatgtgcaccgagatntctgcactaatcaaaggtgaatctgagatgagtatgatgggtgagctaaaattcttgctaggtcttccaaacattcaaaaagatgatgggatattcctccatcaatagaacacataaaacctatataanaggcttagaatggatgaagctagacctatggctacccctatgcaccacttcacaatcattga

SEQ ID NO: 15230 - DNA, 401 bp, Glycine max
tcatgtctttattttcaattacgagcgtctcgatatattacgggactcaatcggacaaccgagtaaaaagttattgtcgtttgaatttgcttactgctgctgaattcaattacgagcgtctcgatatactacgggacacaatcggacacccgagtaagaagctattgccgtttgaatatgctcagagctgctattttaaattacgagcgtctcgatatattacgggactcaatcggacatccgagtaataagctattgtcgtttgaatctgctcagtgcttctgtgctcaatttcgagcgtctagacatactactggacacaatcggacacccgagtcaaaagttattgtcgtttgaatacgctcagagcttctattttcaattacgagcgtctcgatata

SEQ ID NO: 15231 - DNA, 430 bp, Glycine max
  unsure at all n locations
gtgagaaanatcaaacgacaataaatatttactcggatgttcgattgagtcccgtaatatatggagacgctcgtaattgaaaacaaaagctctgagcaaattcaaacgacaataacttttgactcgggtgtccgattgtgtctcgtagtatatcgacacgctcgtaattgaaaagggaagctctaagaaaaatcaaacgacaataacttttaactcgggtgtccgattgtgtctcgtagtatatcgagacgctcgaaattgaaaattgaagctctgagaaaaatcaaacgacaataactttttactcgaatgtccgattgagtcccataatatatcgagacgctcgtaattgaaacagaagctctgagcaaattcaaacgacaataactntntactcgggtgtccgattgagtctcttagtatatcgaga

SEQ ID NO: 15232 - DNA, 418 bp, Glycine max
  unsure at all n locations
agctntgtttagtttgaatataaaagctccaagagcttggtattaaaggctaagctcattcttagttcataatggattcaccagaggaataatggacaccacactatttagaaaggctaagataggaaatctgttgattgctcaaatctatgtagatgacataatctttggtgcaaccacagaaaggatgtgcaaggagtttcctgagctaatgaaaggtgaatttgagatgagtatgatgggtgagctaaaattcttcctaggtcttcaaaacattcaaaaagatgatgggatattcatccatcaagagaacacaaaanacctatttaaaaggtttagaatggatgaagctagacctatggctacccctatgcacccttccacaatcattgataaggattagaaaggtaataaactc

SEQ ID NO: 15233 - DNA, 400 bp, Glycine max
  unsure at all n locations
taaatcccggataagggggtccaaccaaacacctggccaacccctcattgcacctgcaccatactcaccttcacatgttgataaacccactatggattgcttcttagaactccacgatattggtgttgcaccatacatgaatatgtaacctatagtactctntatgtcanttttgtctcatccccaatccgcatcagtatatcccactaattcttctaagttactgttgtctatatttggaaatagatatccagtattgatggtcctttttatgaaccttagaatcctcttagcagctaggagatgaggaattctgggtcttttcgtatatctacttaccagtccaatagcaanatccaaatcaggtcttgaatgacacaagtacctgagagaaccaaca

SEQ ID NO: 15234 - DNA, 415 bp, Glycine max
  unsure at all n locations
taaccttctttataaacgggacattggtgcacaatacacaatgtccggtacaccacaaccaaatggtgtatcacaaaggcacaatagaactttaatggatatgattaggagtatgttaatcaattagactgtatccgtatctttgtggatgtatgccttgaaaactgtcatgtatttgttgaatagggttcctagtaaggcagttccaaagacatcttttgaactgtggacaaataggacacctagtataaggcacttgcatgtttggggttgtcaggcacaaataaagatttataatccgcaagaaagaaaattggatgcaagaacaatcagtggatatttcattggttatcaagaaaagtcaaaggagtatatngtttattgtcctaaccatagtatgagaatcgtcaaaact

SEQ ID NO: 15235 - DNA, 381 bp, Glycine max
  unsure at all n locations
ctcagctctaacttatacagaataagctctgataccacttgtttataagtggcctcagatatcttaagaaggcggggttgaattaagatattgcaacttcatttcccaattaaaatttctatttaactttctattcaagttataaattcccttaataatgaatttcttaaatgttgattcaaatagaacaatttgaatatgaatatngaccactaatatataaaggagtttaagggaagagacaatgcatactcagaattatactggttcggccacacccttgtgcctacgtacagtccgcaagcaactatcttgtaaattccttttacaagttctaaacacacaaagacaaccctctctttgtgttagaatttttcacag

SEQ ID NO: 15236 - DNA, 404 bp, Glycine max
agcttgctttctcatggaagctcctaatatctcccacactttttggggtgggccattcttggatggccttgattttctcagggaccacttggaccccatttctaccaactactaaacctaagaaaactatattatctacacaaaaggtacacttctctatatttgcatagagggtgtttttcctaatgactgaaagaacttgtctgagatgtcctaagtgatcatctagcctcctactatacactaaaatatcatcaaaataaacaactacaaatctacctacgaaatcccttaagacatgatgcataagcctcataaaggtgcttgatgcattagtgagcccaataggcatctctagccattcatacaaaccagacttggtcttgaaagcacttatacactca

SEQ ID NO: 15237 - DNA, 380 bp, Glycine max
  unsure at all n locations
agcttatgattctcattcctgngaattcttggattggatgcttaagtccattggcttcccagcccagttctatacttggatcatggaatgtgtttcttccacttcatttagtgtggcagtcaatggatctatttatggtcacttcaaagggcagcggggtcttagacaaggggatcctctatccccttatctgtttgtgctttgtttggagtacttttccagagatatgagcagtctcaaggatgatgccaattctaaatttcatcccaactgtgcaggtattcagctatctcatttggtttttgcagatgatattatgcttctatctagaggagatatcctttctgtgtcaactatgtctgccaagcttcagcacttct

SEQ ID NO: 15238 - DNA, 403 bp, Glycine max
  unsure at all n locations
agcttgagtacntttgtanggctccaaggctttccatcagctctgataaatctgccatatactcagccggtattaggcctcatgagctttctcatattcaacagcttactggatttagcttgggtgacttgccttgtatatacttgggtgttccccttttatcatgtagattaaatgcatgtcattatgctcccttgctttccaagattacttgcctgattcagggatggagcaccaagtctttatcttatgcaggtaagttagagttgatcagagcagttattcaaggaattgtgaatttctggatggagatttttcctttgccgcaatctgttctggaccaaatcaacgttttgtgccgtaatcttctgtggagcaaagcggatattggaaaaaacaagcc

SEQ ID NO: 15239 - DNA, 391 bp, Glycine max
  unsure at all n locations
agctnngtanaaccaaccaatcagaatgctagacgaaatatagatgggaatagaggtaacaatggcggtaatgacggaccgaggcagaaccgggttgagggagtaaagctcaatgttcctcccttcaaaggtagaagtgatccagatgcctacctggactgggaaatgaagactgagcacgtatttgcctgcaatgactacactgatgcgcagaaagtcaagctagcagcagctgaattctccgactatgcccttgtttggtggcataaataccaaagagaaatgttgagagaggaacggcgagaggtagatacatggactgagatgaaaagggtgatgagaaaaaggtatgtgcccactagctataacagaaccatgcgacagaaactcc

SEQ ID NO: 15240 - DNA, 374 bp, Glycine max
  unsure at all n locations
tcggacattcgtgtgaaagttatgatcattcgaatnnttcaagagcttccgttgntcaatttctagcgtgtcgacatattatgcgccagaatagaacatccgtgtganaagttaagaccatttgaatttctcaagaacttccgttgttcaatttcgagcttcttgacatattatgtgcccgaatcggatatccgtgtgaaaagttatgaccatttgaatttcgcgagagtttccgatgtttaatttcgagcgtatcgatatattataagcctaaatcggacatccgtgtgaaaagttatgaccatttgaatttctcgagaactttccgtgttcaatatcaagcttctcgacatattatgtgcctgaatcggaca

SEQ ID NO: 15241 - DNA, 402 bp, Glycine max
agcttgatcagctctataggaacggctttccaggttccggtggtggtgccggtgggtttaggattcgaattcccactgggttgagcgcgccgcagcagcagcatcctggatctgcttccaaggtgtttgggaaggttgggaatcagagattcagccccaatttgaatcaaaaccctaaccctaatcttgggaagaagagggagagagaccccgtgggtgaagtggtggctgcgattaaggtattgggagatgggtttgtgagaatggaacagatgaagatggagatggccagggagatcgagaccatgcggatggagatggaaatgaagcgcactgagatgattctagaatcgcaacagcggattgtcgaggcatttgccaaggccgtttcggataagaaca

SEQ ID NO: 15242 - DNA, 325 bp, Glycine max
agcaccttcttcaacagatctatgtccctctccacaacaccattctgttgaggtgttcttggcgttgaaaatttatggtgaattccatgttcttcacaaaagtgttcataggactcattctgaaactcacctccatgatcactgctaattgaataaatgtagagaccttttccattttgaattaccttggtaagtgtgcgaaaaacatccaaagcttcatctttggttgtcagaaacaatgtccaaggtaaccttgagtaatctccactattaccaagctatagtaatttctcctaacctatagctcttaaaggacctataatca

SEQ ID NO: 15243 - DNA, 404 bp, Glycine max
agcttgcttattcatggaagctcctaatatctcccatactttttggggtgggccattcttggatggccttgattttctcagggtccacttaaaacccatttctaccaactacaaaccctaagaaaaatatattatctacacaaaaggtacacttctctatatttgcatagagggtgtttttcctaaggactgaagaacttgcctgagatgccctaagtgatcatctaggctcctactgtacactaaaatatcataaaaataaacaactacaaatctacctatgaaatcccttaagacatgatgcataagcctcataaaggtgcttggtgcattagtgagcccaaaaggcatcactagccattcatacaaaccaaacttggtcttgaaagcggttttccactcat

SEQ ID NO: 15244 - DNA, 428 bp, Glycine max
  unsure at all n locations
caagcctncgatttattgcaggtagcaccagacatctctataaagactccttatgaaatgcacatcacctatttttctattctcagcattgacttaggaatatagtcataacctgtacaagaacaggtatgagtgggagtagaatctgaaccgccatcagaacatacatattttcctcagggcccgtgtaactcgatcatagagttcggtatcactctaatcactcggtagatgatagtgatgcacaggtgaaaatctctgatgtcttcattgatgctcttctattgcaagaagaaatggatgcaatggcaacttttagttcgtctcagtaaaaccagtggattcaattcagcttttcctgattattaataatgtcttattggcgtaatctacttctgataagataacagtttcatattttgcttctg

SEQ ID NO: 15245 - DNA, 407 bp, Glycine max
  unsure at all n locations
agcttattaattgaaagttgttctattggaagatcagataaacaaacatgcaagtatcattcctagaacctacattctattccattgtgactttacatctaatctgactttagttgtgtccaatgtgatcaacctagagcatatttgtatttttactcttgcatgcttagctttaaaaactagtgccaattttgaatatttttgagcaaaaacattagttcttagtttatgcgtattttatgtatacaattccttctgtgtgtggcagttgagagggtggaacgagaaggatgatgttgtagctaaatggaagaaagtgcanaatgatatgtgcctacatgctcattgctttgttagtgatcccaattccttcctggatttggctagtgaattgagatatcacatat

SEQ ID NO: 15246 - DNA, 449 bp, Glycine max
  unsure at all n locations
aggactcaagggagttagtgtggagattactctnggatggngatgatgctattctgngacttgcatgagaaggacctgtttgagaagtatttcacacggcttctggcaaagcaacttttgtcccgaataacagtctctgataatgcagaaagaagtctcatagttaagctcaagacccaatgcagttatcaattcacctctaaattagagggcatgtttacagacatgaaaacctctctagaaacattgctgaacttttatatgccaaccaccccgagttaagcaacggtcctacgcttgccgtgcaggttttgacaacagggttttggcctactcaatctactgttacatgtaacctgccagaagatatctcttcactttgtgagaaagttcagtcatatattaccttggcacacatactggcaggagatngtcctgcanactaatat

SEQ ID NO: 15247 - DNA, 343 bp, Glycine max
atctatatatggtgtattacaagcctcccgtcagtggtaccttatgtttcatgggataatatcttcaggtggttttgatgataatcccatgcataaatgcatataccacatagttagagggagtaaaatatatattcttgttttacatgtatatgatattctactagcagctaatgatcggggttgtctacatgaggtgaaacaatttctctctaagaattttgacatgaaggatatgggtgatggatcttatgtcatcgacattaacattcatacagatagatctctaggtattttgggtctgtcacaggaaacctatattaacaaaattttagacagattt

SEQ ID NO: 15248 - DNA, 400 bp, Glycine max
  unsure at all n locations
agcttgcatagttagaaatatcttggttgattccgatggtgtgaagtcaaggaaagatttttctattgccatgatgaggtcatctatagttttaggagcctctttgtgttgtaatgactgaatggcattaaagaagccaagatctaagacattaaaatcaagcaagtttgggggttgagaaaccaatcgaatgtcaaaaccgccttcactagcagcttaatggaagtcgttgtcatcttcatcaatgtgacatggagcattgtcttgttgtatgaaaatagtttctcctctatcccctattggccattttgctttgattgcagacaacacatgatgaataagaaaatgtttgcttacttgcttatttattgaagaatattggtntcgttccatagtccct

SEQ ID NO: 15249 - DNA, 313 bp, Glycine max
ctggggtcaattacgagtgtcgcgatatcctacggcacacaataggacatccgaatcaaaagttattacgtgggactgttcctagagctcccgatttcaatctctagcgtctcgatatattaaggggctcaatcggacatccgagttaaaagttattgttgctcgacttttcttagagcttccgctgtcaatattgagcgtctcgatatattacagggctcgatgcgacatccgactcaaaagttattgtcgttagatctttctcagagcttccgttttcaattacgagcgtctcgatatcctacaggacaca

SEQ ID NO: 15250 - DNA, 495 bp, Glycine max
  unsure at all n locations
cacatagatactaagctgctgcncatggagctcctntatctcccacactnnttggttggaccattcttggatggccttgattntctcaaggtccacttggaccccatttctaccaactacaaaacctaagataactatattatctacacaaaaggtacacttctctatatttgcatagagggtgtttttcctaaggactgaaagaacttgtttgagatgtcctaagtgatcatctaggctcctactatacactaaaatatcatcaaaataaacaactacaaatctacctatgaaatcccttaagacatgatgcataagcctcataaaggtgcttggtgcattagtgagcccaaaaggcatcactagccattcatacaaaccanacttggtcttgaaagcagttntccactcaatcacccttttcatnctgatttggtgataccactttaagaacaattttgaaagaattgcaccatcaactcataagcaatcatc

SEQ ID NO: 15251 - DNA, 471 bp, Glycine max
  unsure at all n locations
catgcgaagtgngtggaattcctagagcaattcctttatgttatcaaacatanaaagggaaaaggtaatattgtagccgatgctctttctcggcgtcatgcattactttctatgcttgaaacaaaattgattggtcttgaatgtttgaaaagcatgtatgaaaatgatgaaacttttggagaaatttttaaaaattgtgaaaaattttcagaaaatggtttctttagacatgaaggctttcttttcaaagaaaacaaattgtgtgtgcctaaatgttctactagaaatttgcttgtttgtgaagcacatgaaggaggtttaatggngcattttgnggtccaaaagactctanaaacattacaagaacatttttattggcctcatatnannaangatgtgcagaaattntgtgaacattgcattgtatgtaaaaaggcaaagtctaaggtaaagcctcatggattgatactc

SEQ ID NO: 15252 - DNA, 406 bp, Glycine max
  unsure at all n locations
agcttgttattcnntatgatagaccagtgagcctcacgttcaaagggaagctagtatttgaggtgaacaggtatggcttcactgatggtggagcttgggttgatgggaacctaaactaatgcaatcctaccccgcaagggcattggatagaaaactccaagtagattaagccagagatgcaagagaaggccctaggattcttatgagccttacggtagatttcgggcccatgggctaagtatgagcccacttatctttgtaaatattagattaaggtttcattatttttgggccttgtatatagagctccataatgtaggtagggtaccctagaaatatatgaattttcagcccttgtattttagggcacctagactagtttttgtattacgggtagttttgtaat

SEQ ID NO: 15253 - DNA, 402 bp, Glycine max
  unsure at all n locations
agctntgtgtatattaaacgacaataactttttactcggatgtctgattgagtcccgaaatatatcgagacgctcgaaattgaataccgaagcgctaagcaaattcaaacgacaaaaactttttactcggatgtctgattgagtcccgtaatatatcgaaaagctcgaatgtgaatgtagaagctctgagcaaattcaaacaacaataactttttactcggatgtctgattgagtcccgtaatatatcgagatgctcgaaatggaataccgaagctcggagcaaattcaaacaataataactntntactcggatgtccgattgagtcccgtaatatatcggaacgcttgaaattgaatgtagaagctctgagcanattcaaacgacaantaacttttactcg

SEQ ID NO: 15254 - DNA, 357 bp, Glycine max
tctacattcaatttcgagcttttcatatattacgggactcattagacatccgagtaaaaagttattgtcgttggaatttgctcagagcttctacattcaatttcaagcgttccgatatattacgggactcaatcggacatccgagtaaaaagttattattgtttgaatttgctccgagcttcggtattccatttcgagcatctcgatatattacgggactcaatcagacatccgagtaaaaagttattgttgtttgaatttgctcagagcttctacattcacattcgagcttttcgatatattacgggactcaatcagacatccgagtaaaaagttattgtcgtttgaatttgctta

SEQ ID NO: 15255 - DNA, 406 bp, Glycine max
agctttcttgttagattcctaaagaagctagaacttagctacacacacctctctaatagctaagctcacctccttgagatgagaagcttgaacttagctacacaccccctataatagctaagctcacccccatgaaaaaatacatgaaaatacaaaaagaaagtccctactacaaagactactcaaaatgcctcgaaatacaaggctaaaaccctatactactggaatgaccaaaatacaaggcctaaacgaaggaaaaaacctattctaatatttacaaagataaacaggctcatacttaacccatgagctcaaaatctaccctaaggctcatgagaaccctatggccttcccttggatctctggcccaatctacttggagtcttctatccaatgcccttgcggg

SEQ ID NO: 15256 - DNA, 400 bp, Glycine max
agctttttctaatacataatatcgtaactacaaaagtcaaaatatataagtctctacatattacagttgtcttatacacattttcatactttaaaaatattctataattttttgttgtcaatattataaaaaattaaaagcataaaatagtaaaattaatttcaatttattcttttttatttcttataattctttcattcatttataaaaaaatatatgaaaataatacctattttttgaaggaggcaatttatttttattacacatatacaaataatatataaaaaaatcataggaacaattgctcccaggttactattgtctatccgccacgtgatgtaacattaattaaatttgttatatcatatcatttataaatgtgcattaatactttacgaag

SEQ ID NO: 15257 - DNA, 377 bp, Glycine max
  unsure at all n locations
agctnnatgcatgaccaccaatggtctatatatatgtgacttaaacacgaaattactcagagattttcagaacaacaaagtgtttatcctctcaaagagcaaattcattttatcctcttaagaattccttggccaattcaattgcaattcattaaggaattatttgagtgctcaatctgtaaaatccatctctttctagagagatttgttcttcttcttcttctcattttctaagggattaagagactgtgagtctcttgttgtaaaggatctctaaacacaaaggaaggattgtccttgtgtgtttagaacttgtaaaaggaatttacaagatagtggaactctcaagcgggttgcttggtgactgaacgtaagca

SEQ ID NO: 15258 - DNA, 402 bp, Glycine max
  unsure at all n locations
agctngcnattcatggnaactcctaatatctcccacactctttggagtgggccattcttggatggccttgattgtctgagggtccacttggaccccatttctaccaactacaaaacctaagaaaactatattatctacacaaaaggtacacttctctatatttgcatagagggcgtttttcctaaggactgaaagaacttgtctgagatgtcctaagtgatcatctacgctcctactatacactaaaatatcatctaaataaacaactacaaatctacctatgaaatcccttaagacatgatgcataagcctcataaaggtgcttggcgcattagtgagcccaanaggcatcactagccattcatacataccacacttggtcttgaaagcacttttgcactc

SEQ ID NO: 15259 - DNA, 401 bp, Glycine max
agcttttgattttccaagtgccaattcgtcttcttctttagtccagtcttcttctggcttcaattcatcagtgggctttccttctgtgtccagcatcttgggatgttcccagcctttgatgacagctttccaggttctgctatccagtgatttgagaaaggccaccatccttgctttccagtattcatagttgatgacagcacctttgtcaatgattttcttcatgcctcttaagtgcagatgtccaaatctttgatgccatattctgacttcatcttctttggaggatagacatgtggaggagtaactggtttcttgaggtgtccataggtaacagttgtcctttgatctgctgcccttcattagaacttcactcttctcatttgtcaccaagcattctg

SEQ ID NO: 15260 - DNA, 490 bp, Glycine max
  unsure at all n locations
gatagattgaacgaatctagtaactaatgccagctttaatcgtatgtatggatagactaaagcagagagtgatcaatataaagaggctcacaggtcgtggtcatgttgtcaagtatcaaatgatgtgaaagaaatgctattcaatggacaacaatatatataggagatatgataaacatatgaaagggaaaaggaaaaggaaaagtaagaaagcaatagacatgttaagttatgtaatgaggtaagtaggaaaaggaataatgaaatggaattaacacaaacattatagaaaaatgactatattattttataagttaacaattatttaaaaaatagaatataagtgatactctattctgaatatatacaaaagaattacacagtcagataacagaaatgagtatataataatgttctcttcgttcttctacactatatctatgtcttncaatggattattcacaattgcacatatataatactcatctta

SEQ ID NO: 15261 - DNA, 339 bp, Glycine max
  unsure at all n locations
tctcgacatatgatgcgcccgaatcggacatnccgtgtgaaattatgaccatttaaatttcgcgagagtttggcgatgtttaatttcgagcgtatcgatatattataagcctgagtcgtacatccgtgtgaaatgttatgaccatttgaatttctcaagagcttctgttgttcaatttcgagcctctcgacatattatgcgcccgaatcggacatccgtgtgaaaagttatggccatttgaatctctcgagagtttccgatgtttaatttcgagcgtatcgatatattataagcctgaatcggacatccgtgtgaaaagctatgaccatttgaatttct

SEQ ID NO: 15262 - DNA, 396 bp, Glycine max
  unsure at all n locations
tggtattgaggtttaagaaccattattcactttcgatctaacgaanacactgtttatcggtgtatgtatctgaaggtcagtgcgagtaagattattttctaattctgtatattgatgatatcttgcttgcagctaatgatcttggtcttcttcatgagactaagacattgctctctataaactgtgaagcgaatgatatgggtgaggtaacctatgtgatacggatagaaatattccatagtagatcacatggattcgtacgcttatctcagaaagtatatatatcgatcaagtgctagagagatttaagatgaataggtgtttaacatcgcctattctaatttagaaatgagacagagttagtcttgcacaattgcctagaaatgatatggaatg

SEQ ID NO: 15263 - DNA, 381 bp, Glycine max
  unsure at all n locations
agctgngtgntntgcaattctaagacactagagagcgggcaagtatatgacatgtcccacttgtactttttctatctaatttgcatcctgcaaaatcagaatatgaaaaacctgttatgtttaaggaggtacctttaagataccacataagcaaacacttagcatgatatccaatctacttgcagataggtagagaagcgattcaatcatacctctgtatcttgattcatccactaatttacctttctcatcaaacgtaaggtaggttgatgtagacatacgagtaaatgcttctttgcattttttcataccaaatttctctatcgagtttatgcaatatttgagttgactgaagaaggctccatgtatcaattgcttgac

SEQ ID NO: 15264 - DNA, 376 bp, Glycine max
  unsure at all n locations
ctgcttagattgtggtctcagcctatctatgacaatgntaagctaagatggctcacagagtccatgggtggtgctctttcttaaccaacctctaaacctctccaatgcttcacttaaggattcatcanggaactgatgaaatgatgaaattgcagctttcccttctgtagtctttgactcggggaagtattacttcagaaatatatcaacaacttcttcccacgtctttagactgctacccttaaatgaatggagccacctcttggcttctcctgccaaggaaaacgaaaataggctgagtttgatggcttcatctggtatgcctgcaatctttacagtgttacaaatttcaatgaatgttgccaaatgtgcatag

SEQ ID NO: 15265 - DNA, 404 bp, Glycine max
agcttgccatgattagaggcgtcggggtcacgagctatgcggatacctaatgctcccatttgcttgggacgcgtgactggtcctagttcgcaagattccaacccttcgtataccagaagaagaccaaacgaagttgtgagtttttctatcaatggcggcatagattgactaatgcagccagaatagctgcataatgtacattggaagggaggataggacatatttagctaaacaaagtcatccagccctattcaaaagtttccctttccatgaagctagccttctatgaattttatccaagataaaatccaaagattgatggtgttgtctcccttgcaccaaggaaaaccctagatagcggccaaggttggaaacactcgcgatgccacaaacatccttgaata

SEQ ID NO: 15266 - DNA, 342 bp, Glycine max
tgatactatgtatcttctgcatgaatcaccataccagatactctgtccttctgttgcagcacatctaggagtcacatgagcatacttgaagctcatgctgcaaacatttataatagaccccctcagcaacacaaccaacaacacgagaataactatgatctttcaagcaatagattcacttcacgctggagagatcatccaaatctgagatgggcaagtgctgcacaacaacaacaacctggacgtattttgcaaaatgctgcgtggccaagcaagccatatgttcctcctccaatacattagcagcaatagcagcagttacaacaaagactacaagcacct

SEQ ID NO: 15267 - DNA, 401 bp, Glycine max
  unsure at all n locations
agcttgttattcaatatcctgatgatggtgttccatatgttctcaagactggactaatacatttgttgcccaagtttcatggtctcgcaggtgaagatcctcataagcatcttaaggatttccatatttttttccaccatgaagccccatgatgtccaagaagatcatatctttctaaaggcttttcctcattctctggagggagtggcaaaagattggctatactaccttgctcccaggtccattttcagctaggatgaccttaagagggtgttcttggagaaattcttccctgcatctaggaccactgccatcaganaagacatttcaggcatcaggaaacttagtggagagagcttgtatgagtactgggaaagattcaagaaattgtgtgcaagctg

SEQ ID NO: 15268 - DNA, 238 bp, Glycine max
  unsure at all n locations
agcttgaatcgtacatccgtgcgaaaagntatgaccatgcgaatttctcaagagcttccgctgctcaatttcgagcctctcgacatattatgcacccgaatcggacatccgtgtgaaaagtcatgatcatttgaatttctcgagagtttccgatgtttaatttcgagcgtatcaatattttataaccgtgaatcggacctcagtgcgaaaagttatgaccatttgaatttgacgagag

SEQ ID NO: 15269 - DNA, 337 bp, Glycine max
cactatagacacacaagcctcggtattcaatctcgagcgtctcgatatattacgggactcaatcatacatccgagtaacaagctattgtcgtgtgaattatctctgatgttcacaattccatttcaagcgtctcaatagattacgggactcaatcagacgtccgagcaaaaagttattgtcgcttgaattagcttagagcttcaaaattcaatttcgatcgtctcgatatattacgggactcaatcagacatccgagtaaaaagttattggcgtttgaatttgctcacagcttcaacattcaatttcgagcgtgtcgatgtattacgggactcaatc

SEQ ID NO: 15270 - DNA, 350 bp, Glycine max
agctttgttctaattcaaatgacaataaccttttgctcggatgtctgattgagtcccgtaatatattgagacgctcgaaattgaattctgaaccttagagctaattcaaacgacaataactttttactcggatgtctgattgagtcccgtaatctattgagacgctcgaaattgaactctgaaccttagagctaattcaaacgacaataacttattactcggatgtctgattgagtcccgtaatacatcgagacgctctaaattgaatgttgaaacctctagctaattccaacgacaatgactttttactcggatggccgattgagttccggaatacatcgagacgctcg

SEQ ID NO: 15271 - DNA, 390 bp, Glycine max
agcttgttacccatggaagctcttaatatctcccacactttttggggtgggccattcttggatggccttgattttctcagggtccacttggaccccatttctaccaactacaaaacctaagaaaactatattatctacacaaaaggtacacttctctatatttgcatagagggtgtttttcctaaggactgaaagaacttgtctgagatgtcctaagtgatcatctaggctcctactatacactaaaatatcatcaaaataaacaactacaaatctacctatgaaatcccttaagacatgatgcataagcctcataaaggtgcttggtgcattagtgagcccaaaaggcatcactagccattcatacaaaccaaacttggtcttgaaagc

SEQ ID NO: 15272 - DNA, 278 bp, Glycine max
agctttttacattcacgtgccttatggagctcagagcctgaacctccgcgtcaaactcctttgacttcccaccaccaccgtgcttgttcccaagcatgggggtgctactccacgagttctttctccttgcagggacatcggtgttccaaatatgcttcaccgcgagttctttcccattggaaagagtgaccctgtacacgttccccgagcctcctatccctatgagattctcctgcttgatggaatctacaatctctccctccgagaaactcatcacg

SEQ ID NO: 15273 - DNA, 408 bp, Glycine max
  unsure at all n locations
cccctcagtcgcagaaccaacaactttagaataattatgacctttcaagcaacagatacaatccgggtgggaggaatcatccaaatctaagatgggcaagtcctccacaacaacaacagcctgtccctccctaccagaatgctgctggtccaagcaagccatatgttcctcctctaatgcaggaacaacaacaacaacaacaaagacaacaagcaactgaggccccttctctaccttccttagaggagttagtaaggcaaatgacaatccanaatatgcaatttcagcaagagacaagagcctccattcagagtctgacaaatcagatggtgcggatggctactcgagtgaaccaagctcaatcccaaaattctgacaaatagccttcataaactgtgcacaatctga

SEQ ID NO: 15274 - DNA, 470 bp, Glycine max
gcgtctcgtatattacgggactcaatcagacttccgagtaaatatttattgtcgtttggattggctcagagaggcaacattcaatttcgagcgtctccatatattacgggactcattcagacatccgagtaaaaagttattgtagtttgaattagcttagagcttcaacaatcaatttcgagtgtctcgttatatcacgagactcaatcagacatccgagtaaaaagttattgtcgtttgaattggctcagagcttccacattcaattttgagcgtctcaatatattacgggcctcaatcagacatccgagtaaaaagttattgtcgtttgaattggctcagagcttcaacattcaatttcgagcgtctcgatatgtgacgagactcaatcagacatccgagtaaaaagttattgtcgcttgaattggctcagagcttcaacattcaatttcgagcgtctcgatatatta

SEQ ID NO: 15275 - DNA, 181 bp, Glycine max
gagaaccagcgcatgagagataacttccttcagcttgttgaaagccttctgagccttcggcgaccaacgaaatctgtctttggccaagagttgagttcaaggtgccactatggaaacgtatcccttaataaacctccgatagaagcctgacaagccgagaaagcctcttaaagctctggta

SEQ ID NO: 15276 - DNA, 400 bp, Glycine max
agctttttgaaaattcttatggtcataacttttcacacagatgctagattaaggcgcatcgcatatagagagactcgaaaatgaacaacggaagctctcgagaaattgaaatggtcataacttttcacactgaggtccgattcaagcttataatatattgatatgctcgaaattaaacatcggaagctctcgagatattcaaatggtcataacttttcacatgaatgtccgattcgggcgcataatatgtcgagaagctcgaaattgaacaacggaagctcttgagaaattcaaatggtcataacttttcacacggatgtccgattcaggcttataatatatcgatacgctcgaaattgaacatcagaaactctcgcgaaatttaaatggtcataacttt

SEQ ID NO: 15277 - DNA, 396 bp, Glycine max
  unsure at all n locations
caatttcgagcctctcgacatattatgcacccgaatcggacatccgtgtgaaaagtcatgatcatntgaatttctcgagaggttccgatgtttaatttcgagcgtatcaatattttataaccgtgaatcggacctcagtgtgaaaagttatgaccatttgaatttgacgagagcttccgttgttcaatatcgaatatcactatatgtgatgcgcctaaattggacattcgagttgaatgttatgaccatttggatttctcaagagattctgttgttcaaattcgagcgtctcgagatcttatgtgatcgaatcggacattcgtgtgaaaagctatgaccatttgaatttctcaagagcttgctgtggtcaatttcgagcctctcgacatattatgc

SEQ ID NO: 15278 - DNA, 412 bp, Glycine max
  unsure at all n locations
agcttatctattaatttcgaccgtcttgatatgttaagggactcaatcagacatccgataaaaaagctattgtcgtttgagttggctcagagcttcaacattcaatttcgaccgtctcgatatgttacgggactcaatcagacatccgagtaaaaagttatggtcctttgtattggctcagagcttcaacattcaatttcgagcgtctcgatatgtgacgggactcaatcagacatccgagaaaaaagctattgtcgtttgagttggctcagagcttcaacattcaatttcgagcgtctcgatatgttacgggactcaatcagacatccgagtaaanagttatggtcctttgtataggctcagagcttcaacattcaatatcgagcgtctcgatatgttacgggactcaatc

SEQ ID NO: 15279 - DNA, 427 bp, Glycine max
  unsure at all n locations
tctgttntcaatntcgagcgtcttgatatattacgggattcaatcgatcatccatgttacaagttattgcgaattgcattntctaccaccttttgttttccattaccagcatctcgatatattacgggactcaatcggacatccgagttgacaggtattattggtttgcatttttacaagcttccattttcaatttcgagcacctcgatatattacgggactcaatcgaagatccgagtcaaaacttattgtcgttngaatttgctcacagcttctgtattcaatttcaagcgtctcgaaatagtaagagaactcatcggatatccgagttaaaagttattgtcatttgaatntgctcagagcatcttgtcataccctaatttcgtccggggatctttgcttgatgacatgcgacctttctttggcc

SEQ ID NO: 15280 - DNA, 443 bp, Glycine max
  unsure at all n locations
agcttgtatacatgatttngaattttatgatcctaatagctccgtgtttgggaaacataaaattcctcttcaatgtatccatttacgaaaacactnttgacatccatttggtatagtttgaaatccataacacaagcataagcaaatagaaatcttacaacctctaatctagctaccggtgcataggtttaaccaaagtctatatgctcttgttgagtatagcccttggctactagccttgctttattcctaatgatcaaaccatgttcatccgatttatttttaaacacccatntagtgctaatggtgtgcatatctttagaataagatacccaattccatacatcattccttttaaattggttcaactcctcatacatggacattatccaaaactcatctttaagtgccttctctatagacatgggttctacttgagacac

SEQ ID NO: 15281 - DNA, 416 bp, Glycine max
  unsure at all n locations
agcttgttgcaattcttctagacttggagttataacatgcagtcctcttgaacccttacctcccactctttcgtcatgccgggactcanganacccaacaggttttgccttttcaatgtactctgaacaaaactcaatagcttctttggcaatatacctttcaataatagatgcttcaagacagtctagattctttgcatacccttttatgatcttcatgtatcactcaaccaggtatatccaccacaaataaatgggaccacaacatttaatttccctcaccagatgaacaattaagtggtgaaccatgatgtcaaanaacanaggaggataatacatctccaactgacaaaataaaatagcagcctcgttttcaactcatctaacttgagaggatcaatgactntactacatat

SEQ ID NO: 15282 - DNA, 464 bp, Glycine max
  unsure at all n locations
agagaatatcatctctctngaaaagcaaatcacctgatctgcattctttattgcactcaaatattcaccactnggtgaaacatcagccacagaattcaacaaattctctctgggtatcctcacattatcaaacctgaagacacatgtgaataatttctgcgtttactcttttatataaaatntcattttcaggtgcaacttgtttgaaaaatgtatatattaccagatacggccattatcaactccatttaaaccaattntgtgaccacaatcagctattcggatgtttggacatatgtttccatctgaatccctgatttgngcaataaatgcatgcaccccttgattgctccatttatatagagctgtgaaaagactatagtgtgggttgcatgctgaataaaagaacaagttaatataagggtaatatatacaaagttggagccagtgaaaaatgtatcatg

SEQ ID NO: 15283 - DNA, 455 bp, Glycine max
  unsure at all n locations
agcttgccaagaagagaggtgttggtgttacgagctatgcggatacctaaagctcccatttgcttgggacgcgtgactggtcctagttcgcaagattccaacccttcgtataccagaagaagaccaaacgaagttgtgagtttttctatcaatggcggcatagattgactaatgcagccagaatagctgcataatgtacattggaagggaggataggacatatttagctaaacaaagtcatccagccctattcaaaagtttccctttccatgaagctagccttctatgaattntatccaagataaaatccaaagattgatggtgttgtctcccttgcaccaaggaaaaccctagatagcggccaatgttggaaacactcgcgatgccacaaacattcttgaatatattcttcatgcgggtngggattcccttggagctcatcatcgtagatttat

SEQ ID NO: 15284 - DNA, 385 bp, Glycine max
  unsure at all n locations
cctagtaactcagcttgccatgaatcaganatctgcacctgttgcaagagtctatgatctatgttcttctgcagatcaccatacagatctctgtccttctttgcagcaatctggagtcaatgagcaacttgaagctcatgctgcaaacatttataatagaccccctcagcaacaaaaccaacaacaagagaataattatgatctttcaagcaatagatacaattcaggttggagaaatcatccaaatctgagatgggcaagtcctccacaacaacaacaacctgtccctattttccaaaatgctgctggtccaagcaagccatatgttcctnctccaatacattagcagcaatagcagcagtcacaacaaagacaacaagcaact

SEQ ID NO: 15285 - DNA, 423 bp, Glycine max
  unsure at all n locations
tgtgaatgtatgtatacatgattntgatgatgtcaaaagaagaatcaaacaaggctcattntgcttcaagattaatacaagattgtttcaacaaacaaagccttgattcaagatttcttcaagatcaagccttgcctcacaatgaaaggtttcaagtcattcaaggcacatgtaatcgattaccaatggtttgaaagtgtgtaatcgattacacatcatatgtaatcgnataccagagactctgaacgttgggaattcaaattntaaatgaagggtcacaactgttcaagaaaaacaactgtgtaatcgattacactaattctgtaatcgattaccanagaggattntcaaggaatatcgccaacagtcacatcttatcatttgaattttgaatggccatcaaaagcctatatatatgtgtga

SEQ ID NO: 15286 - DNA, 439 bp, Glycine max
agcttatgtgaacgttctgtataatgtataaagccacaaaagaaggcaactacctgtctcaagagatccattgtactgttaaacgttaaaacaaatatctgggagcttatttgaccccactttgaaaaacgatattgaaatacaatgaacaactaagtactgcatacaagaagtacgcacgtaaactacataattcaataatggttacactcgtaactattgtgtcacattagtttaaaacaagtacaactttagcacaacttactacgttgactagggacattagattccacaaagcatacagtcgagcaagcccagctgatctcctaggtccttgactaaacaaagcgctgattccagatggaaatggaaataggacaccatgagggaggacaaatagaactaataagaagctcaacagagacagcgagtacatctg

SEQ ID NO: 15287 - DNA, 386 bp, Glycine max
  unsure at all n locations
tatcctgatgagggtgttccatatgttctcaagactgtattaatacatntgctgcccaagtntcatgggcttgtaagtgaagatcctcataagcatcttaaggagtttcatattgtttgttccaccatgaaacaccatgatgtctgttccaccatgaaacaccatgatgtccaggaagatcactatcttttacaagctnttcctcattctctggagggagtggtgaaagatgggttgtactaccttgctcccatgtcctttaccagctgggatgaccttcagaaggtgttcttggagaaattcttccctgcatctatgaccattgccatcagaaaagacatttcaagcatcaagcaacttagtggagaaagcttgatgaatacttg

SEQ ID NO: 15288 - DNA, 421 bp, Glycine max
  unsure at all n locations
agcttatatcacataattgacaaactcttaataaactatgcttaagaccatcaacaagtaaaacattttctatggaggtagagggattcaaacctatttttccaactccaagaattntacctttgctgttgtctccataggtcacatgtttactatttttggaagaaatatgaataaactntgatgcatctcccatcatgtgttcagagcaaccgctatcaatgtaccaattatgcttcaaggagtctttcattcatataatcatatnttgattttggtacccanatnttcttgngttcttaaatgttagttatgactaacgatccttttggaacccataccatttttctaatgctactaccattctttctaatataacatattgatgcactataacctttcttaccacaatanaagcatg

SEQ ID NO: 15289 - DNA, 287 bp, Glycine max
  unsure at all n locations
agcttgaagganaactatatgcattgtttaacttgtttacccagctagccttgaatcataaatctgtacctgtcgcaagagtctgtggtttgtgctcctctgctgaccaccatacataccttngccctgtcatgcagcatcctggagcaattgagcagccctaatctcatgctgcatacatttactatagacctcctcaacctcagcaggcaaatcaaccacagcagaacatttatgacctcccatgcacatatacaaccctggatggatgaatcacccttatctca

SEQ ID NO: 15290 - DNA, 428 bp, Glycine max
agcttgaaggtacgttatgatgagtgtaggagagggggaagggggaacaaaattttgatagagagaagatgaagaatgaagtatgaactttgaagactaatttctcatcaaagtttcaaaatgcacacacaattgttctttccctttttgtatttgataacatatggaaattgctctaataactctacccattttgcatgcctgttatctaacttgcattgccctctaatgtacttaagtgattcatgatcactatgaataacacactccttggaaacaaggtaatgttcctaagtttggaaggctctaactaaggcatacaactccttatcatatgtggagtggttgagagtggcatcatgaagtctctcactaaagtatgcaagagggtgcccaccttgcaacaacataggctcccacacctacac

SEQ ID NO: 15291 - DNA, 431 bp, Glycine max
  unsure at all n locations
tccaccccnatatctcaagttttaggtaagaattcaagaccctttggaaggtacactgaattaattctctcagagtctccattgtgagatntgaaagtgagtaatctcaggtttggcatctttctgaatactttggagcttaaatttatatgtgtaatttgagtcatatctaaccatattccttcaactgcagcagttccctgacaaataataattagaattaatgtttacatcttttgtaataatttggcatttttataccaagagtttaggaatgcaagtcaaagtatcattaacatactctattatttgtcaatacatcatagatntccacaggatcccacaatctactgcgttgccctgganatntaacagattcttcacgaacaacttctctacccatttcttgtatcagatcgtgcatatctatg

SEQ ID NO: 15292 - DNA, 407 bp, Glycine max
  unsure at all n locations
agctntgagccaattttattgataatatacgtttactcggatgtccaattgagtcccgtaatatatcgacacgctcgaaattgaatgttgaagctctgagccaattcatacaacaataactntttactcggatgtccgattgagtgacttaatatatcgggacgctcgaaattgaatgttgaacctctgagcaaattcacacgacaataactttntagtcggatgtctgattgagttccgtcatatatcgagacgctcgaaattgaattttgaacctctgagccaattcaaacgacaataactntttactcggatgtctgattgagtcccgtaatatattgagacgctcganatngaatgttgaagctctgagccaattcaaacgacaataactntttactcggatg

SEQ ID NO: 15293 - DNA, 371 bp, Glycine max
  unsure at all n locations
gctaacattcaactntgtgcgtctcgatatattacgggactcaatcagacttccgagtaaaaagttattgtcgtatgaattggcttaaagcttaaacattcaactgtgagcgtctcgatatattacgggactcaatcatacatccgagtgacaagttattgccgtttgaattggctcagaggttcaaaattcaatttcgagcgtctcgatatattacgggactcaatcagacatccgagtaaaaaagtattgtcgcttgaattggctcagagggtcaacattcaattttgagcgtctcaatatattatgggactcaatctgacatccgagtaagaagttattgtccgctaaattggctcatacgttcaaca

SEQ ID NO: 15294 - DNA, 462 bp, Glycine max
  unsure at all n locations
agcttgcanatctttttattgaactgttattcaaaaccaagaggtgtgtccatgtagacttcctcctctaagtccccatttaaaaaggcattctttacgtcaagttgttgtaatcgtcaatctaaatttgcagccaatgataagaggactctaatggtgttaagttttgcaacaggagcaaaagtttctgagtaatcaataccataggtttgggtgaagcctttggcaactagcctggccttgtacctctcaacaaacccatttgcgttatacttgatagtaaacacccatttgcatcccacggttgttnttcctcttggtaggtccaccactttccaagtctgattnttttctagagctctcatctcctccatgacagcttccttccacttaagaacccttagagcttcctgtatatctcttggtatttctatanttgtcagttcacaagtaaaagctcta

SEQ ID NO: 15295 - DNA, 384 bp, Glycine max
  unsure at all n locations
agcttactaatctggtttaaatcctttcccataaataaattaaattcaaatctagataagataagataagatctagattaaataatatctagatgagaaattcaaatctagataagataagatcagatctagattaaataatatctagatgagaaattcaaatctagataagataagataagatctagattaagtaatatctagatgagaaattcacatctagataagataagatctagattaaataatgtctagatgagatcaaatctaaataatatctagatgagataaagatcagataagatctaattntgtagaataaaatagtctgccctcttcaagtccaagcccaattctggattcatacccatgcccgattctgga

SEQ ID NO: 15296 - DNA, 407 bp, Glycine max
  unsure at all n locations
agctttttattatcagtagatgaagatgaatctgtggccacctcatggactcctctaagaacaatatcatcatttcttgcactgaatttgtgggagccatcttctcaatcaaatttctagcctcaacacggtcatatcaccaaaagcttcaccattggcagcgtcagtcatactcctctccatgttgctaagtccctcatagaaatattgaagaaggagttgctcagaaatctggtggtgaggacaacttgcacacaatttcttgaatctttcccagtacttatacaagctntctccactaagttgcctgatgacctaaatgtcttttctgatggtagtggtcctagatgcagggaagaatntctccaagaacaccctcttaaggttatccagctgantatggacct

SEQ ID NO: 15297 - DNA, 378 bp, Glycine max
  unsure at all n locations
agcttccgtaaaatttatatggctataactgttgactcggatgtccgattacaaccataatgatgcaatcctacccccaaagcttattggatagaagactccaagaggattgggctagagcggctaaaaaaggccctatggttctcatgaatcttaaggtagatttctgagcccatgggccaaggctgggtccactcttctttgtaaatattagaataggttttccttcttttgngccttgtattttgatgcaatcctaccccccaatcttattggatagaagactccaagaggattgggctagagcgactaaagaaggccctanggttctcatgaacctcatggtagaatttttagcccatggtgatgcaatcctac

SEQ ID NO: 15298 - DNA, 336 bp, Glycine max
ctcagggtccacttatatcccatttctaccaactacaaagcctaagaacactatattatctacacagaacgtgcacttctctatatttacatagagggtagttttcctaaggactgaaagaactttcctgagatgtcctacgtgatcatctatgctcctactgtactccaacatatcgtctctataaacaactacaaatctacctatgaaatcccttaagacatgatgcataagcctcatacaggtgcttggtgcattagtgagcccaataggcatcactagccattcatacgaatcacacttggtcttgaaagcgagattgcactcatcactctt

SEQ ID NO: 15299 - DNA, 344 bp, Glycine max
tctagcaagaagcttctgacagtttatgactatgataatgaggcagtggaagcaatgattagttgctcagagaagagaggagccaaggcacatagcagcacctgcaaaaccaaaagaaggttctggaagtgtggaagcaaaaggaccagttgagagacttcaaagtaagaaagcacaagatagtggtgagaatggtgggtttaacattgagtgcaggtgtttggatcaagtggactctttgggattgataatgatcaccaatagaacgaggtaccttataaattggctggtgaactccatgatgaagctgaagcaccctaacgcagaggggttcccctagtcaa

SEQ ID NO: 15300 - DNA, 397 bp, Glycine max
  unsure at all n locations
gaagagggcattctattgattangaaacaagcagtaagcaccgcgtctccccaatgatgtgtacgaacattcgaatttagcattatggaacgagcagtttcaagaagatgtcgattcttcctttctgctataccatttttgtgtggagtgtgtggacatgtggactgatgtataatacctttggaagacaaaaaagaagaaagatcatgcgagaagtactctttagcattatcacttctgaaaattntaattggtcatccaaaatgattctcaatctcattgagaatgacacgaatataggcaaaagttcagatctgtctttcattagataaacccaagtacatctggagaattcatcaataaaggttacgaaatatcgaataccaatagatgtgac

SEQ ID NO: 15301 - DNA, 367 bp, Glycine max
  unsure at all n locations
agcttgtatgtgcgtaccccaccattgttcatagtataacattggtaatgtgtctactattattgtgatcatctctttctccggcattggaggtgccacttgagctgccaggtctctccacctttgggcgtattctttgaaagatctgtgccccttattgcacatgttctatagttgcatcctatccggagccatatcagaattgtactgatactgcccaacgaatgcaaccattaggtctttccaagaatggactcgagaaggttccaaggtatgtgtaccangtaacagctacccagtaagactttcttggaagacatgtatcagcagtttctcatcttttccgtatgcccccatcttccgacaa

SEQ ID NO: 15302 - DNA, 457 bp, Glycine max
  unsure at all n locations
agctntcttgaganatcttccttgataagcttctttgagaaanattccttgagaagctagagcttagctacatacacccctctcataactaaactcacctccttgagaagcttccttaagaagattccctactacaaagactactcaaaatgcctcgaaatacaaggctaaaatcctatactactagaatggccaaatacaaggcccaaacgaaggaaaaacatattctaatatttataaagataagtaggcacatacttagcccatgggctcgaaatctatcctaaggctcatgagaaccctaggggcttcccttggatctctggcaccatctacttggagtcttctatccaatgctcttgcggngtangattgcatcattccctccaccttggaaaggatttgacctcaaatcttgagattcttcatactctgggctcccttcctcaacacctat

SEQ ID NO: 15303 - DNA, 405 bp, Glycine max
caattcagagtcttcataaatgacgaattggtctttagttcttcttaagtacttaagtatggtcttaaccacttttcaattgttctcaccaacgtttgcttgatatcaactatgtacacctaatgcataagcgacatcatgacgtgtataagtcatggtgtacatgatagcctccagtgcactagcatatggtactctactcgtgtgttctctttcttcacgagttggtggacagttctccctactaagagtaaattccacacctacaggcaaatagccttgtttggaatatccatgtatatctcttaagatagatcaatgacatagattggagagtcaagcacctattgatcttctctataattttataccaaatatagtgttctccacatctcatggaaatgt

SEQ ID NO: 15304 - DNA, 393 bp, Glycine max
  unsure at all n locations
tctatagaaggttcattcctaatttctctacaatagcatcacctctcaatgagtagatgaagaagaacgtggcatttacctggggtgaanaacaagagcaagcctctgctttgctctaagaacagcttactaatgcacctattctagctcttcctgactattataacactcttgagctagaatgagatgcctctggagtgggagttggagttgtattgatacaatgtgggcaccctattgcttattntagtgaanaacttcatagagcctccctcaactaccccacctatgatacacagttctatgccgtaataagagtcctccaaacttgggaacattaccttatctccaacgaatttcgcattcatagcgatcatcaatcacttaagtaca

SEQ ID NO: 15305 - DNA, 435 bp, Glycine max
  unsure at all n locations
tgctagcttttagatccggtcatggaaagacttggcaactgccttcattaggcagtaccaatacaacacggatatggctcctgatcggaaccaacttcagagcatgaccaagcgggagcatgagctcattaaagaatatgctcanaggtggagagacctatcagcccaagtcgtcccccctatgactgacagggaaatgatcacgattatggtagatacgttgcccacattctactacgagaagctgatatgatatatgccggctaactntgcagacctcgtcttcgctggagaaagaatcgagctcggactgatgaaaggcaagtttgaatatgcctccagcgttgcccccaacaacaatagaagagccncagtggtgggcacacgggagaaggaaggagatacccacgcgatcaccaccgccctaacatggat

SEQ ID NO: 15306 - DNA, 400 bp, Glycine max
  unsure at all n locations
agcttcttttntaaatggcatttactacaccgtcaaacanatatgaaaataatcagctgccggtgtttgtttggtagctaaaacaaggcagaaattgtaaatttaatgaaaagatcaatggttaaggaatgataatgtaaactaattnttattctcaattaatactcaattaattttaaatggcattntctaattgatataattnttaagataattctattaacaaattaacanatgtgtattttggttaattgtattcttcaaaagtgttttttttattaatatgcttgtctaaactatgtttctctttntataataagtaatatctacttattacaaagtatttcttaaaaacatctttttttaaacattatgtttaaagttatcttctcttaatatg

SEQ ID NO: 15307 - DNA, 385 bp, Glycine max
agctttggttctaatagctccaatcacgtctattccccatatagagaacgaccaaggcgctgccaagacattcaaaggtacaggtgaagcattgacattattgacgaaggcctgacacttgtggcactttctcacatggatgcaacaatcgttttccatagtgagccagtaataccctgctatcaaaatcttctgggccatggcatttccattggcatgtgttacaaaggatccctcacgtacttccactagcatctgcttagcctccctggcatccacacatcgaagcaaaaccatatcatgggtcctctatgatgggaaaaccaagtgcttggttcaagttggatcttctaggatggaatttgtgcaccaggagcaacaaccc

SEQ ID NO: 15308 - DNA, 462 bp, Glycine max
  unsure at all n locations
cgtacnnccaccattttcatagtagaacattggtaatgtgtttactatcattgtaataatctctctctatgttattgagggtgctacttgagctgccaaatccttccacctctgggcatattccttgaaggattcatgctcttttttgcacatgttctatagttgcatcttatctgaagccatatcagaattgtactgatactgcttaacgaacacaaccattaggtccttccaagaatggactcaggaaggttcctaagttagtataccaggtgatagttgtcttagtaagactttcttangagaaatgtattagcagtttctcatcttttgtgtatgcccncatcttccgacaatacatctttagatggttcttggagcaagtagtccccttgtacttgtcaaagtccgacaccttgaacttgngaatgaccatgttcgggtactaagaacaactcttct

SEQ ID NO: 15309 - DNA, 381 bp, Glycine max
tcaagtttgacaggtttgaaatatatctctgatgtcttatatgtgcctgacattgatcaaaatctacttagtattgctcagcttgtagagaaaggcttcaaagttatatttgaagaaaattggtgcttgatcaaagatgcaataggaaaagacgtatttagggtaaaaatgagggctaaaagctatgctttaaatctaatggaggagaagcaaatagctttttcaagcatgaccaccaatgttgaactatggcacaaaaggctcggacacttccatcttgctagacttttatgcatgcaaaaacatgccttggtgaaaggtgtgtcaatccttgaagacaagttagccgattgcgtggcttgccaatatggtgagctagtc

SEQ ID NO: 15310 - DNA, 356 bp, Glycine max
agctttaacattcaacttcgagcgtctcgatatattacaggactcaatcaaacatccgagaaaaaagttattgtcgtttgaatttgctcagaggttcaacattcaatttcgagcgtctcgttatattacaggactcaatcagccatccgagtaaaaagttattgtcgtttgaattggctgagagcttcaacattcaatttcgagcgtctcgatatgttacgggactcaaacagacatccgagtaaaaatttattgtcggttgaattggctcagagcatcaacattcaatttcgagcgtctcgatatatgacgggactcaatcagacattcgagtaaaaagttattgtcgtttgaat

SEQ ID NO: 15311 - DNA, 476 bp, Glycine max
  unsure at all n locations
gacactatgatactcagcttgagccattcanacaacaataacgttntactcggatgtctgattgtgttccgtaacatatcgagacgctcgaaattgaatgttgaagctctgagccaattcaaacgacaataacttttttctccgatgtctgattgagtcccgtaatatatcgagacgctcgaaattatatgttgaacttctgagctaattcaaacgacaataactcttttctcggatgtctgattgagtcccgtaacatatcgagacgctcgaaattgaatgttgaatctctgagcaaattcaaacgacaataactttttactcggatgtctgattgagccccataacatatcgagacgctcgaaattgaatgttgaacctctatgccaattcaaacgacaataacattntactcggatgtatgatngagtcccgtaacatatcgagacgctcganattgaatgttgaagctctga

SEQ ID NO: 15312 - DNA, 383 bp, Glycine max
agttttgatgtaacatttggagaggttaatgaaacaacgagatgatgcgctccatgagaggttggatcaaatggagaatagagaccatatgaattgctcaagagcttccattgttcaatttcgagcgtctagatatataatgcgcctcaatcggacctccgagttaaaagttatgaccatttgaaatgctcaagagcttccattgttcaatttcgagcgtcacgatatattatgcacctgaatcggacctgcgagtgacaacttatgaccatttgaattgctcaagagcttccattgttcaattttgagcgtcacgatatattatgcacctgaatcggacctgcgagtgacaacttatgaccattttgaattgctcaagagct

SEQ ID NO: 15313 - DNA, 344 bp, Glycine max
  unsure at all n locations
agcttgagttgtacaagccaaaagtgacagtgattaatacttgtaacttgttgaagttaatgaaacttggtggttagccaagaactggacatatggggggatgatgcaatcctacccccaagggcattggatagaagactccaagaagattgggtcagaactactgaagaaggccctatggttaggtttttggcccatggactaagtatgagctcacttatctttgtacatattagattagggtttcattattttttggccttgtatttagggctccatagtgtagggagggtaccctagtaaagtaggatctttcagcctatgtattntagggcacatagact

SEQ ID NO: 15314 - DNA, 411 bp, Glycine max
  unsure at all n locations
ctcactcggaggcccgattcangcgcataatatatcgagacgctcganattgaacaacggaagctatcgagaaattcanatggtcaatacttcgaactcggaggtcctattaaggtgcataatatatctagacgctcaaaattgtacaatggaagctctctggctatacaaatggtcataacttttcactcgaaggtccgattaaggcgcataatatatcgagacgctcaaaattgaacaatggaagctcttgagcaattcaaatggtcataacttgtcactcggaggtccgattcagctgcataatatatcgagacgctcgaaattgaacaatggaagctcttgagcaattcanatggtcataacttgtcactcgaaggtccgattcaggcgcataatatatcgagacac

SEQ ID NO: 15315 - DNA, 335 bp, Glycine max
  unsure at all n locations
agtcttgtagcaaattcaaacgacaataactttttactcgggtgtccgattgagttcagtaatatatcgagacacttgaaatagaaaacgaaaacttgtagcaagtgcataccacaatcaattntaactcgtcgcgaaatatgttgagatgctcgaaattgaaaaagaaatttcatagcaaattcaaacgacaataactttttacacggatgttcgattgagtcccgtaatatatcgagatgctccaaattgaaaacggatgctcaaatcatattcagacgacaataactttctacacggatgtctgattgagtcccgtaatatatcgagacgct

SEQ ID NO: 15316 - DNA, 496 bp, Glycine max
  unsure at all n locations
cactcagcttcgttaattcaccgctcgataataccggtctcatccggattttcgtgtataaagntattgtcatttcaatgtgctcagagcttctagtctncaatttgagcgtctcgatatattacccgattcaatcggacatccgagtaaaaagttattgtcgtttgaatntgatacgagcttccattttcaatttggatcatctctcgataaatcacgacactctgctgggcatccgagtaaaaagttattggcgtttgactcttctaagagtttccattntcaatntggagcgtctccatatattacgggactcaaccagacatccgtgtataatgttattggcattacaattctctcagagcttctagtctcaatttggagcgtctcgatatattacccgattcaatcggacatccgagtaanaagttattgtcgtttgaatctctatgagcttccgtntcaatttcgagcgtctcgatatattacaggactc

SEQ ID NO: 15317 - DNA, 396 bp, Glycine max
  unsure at all n locations
tcaagtttgtggatagcatccacagcattgttttcacccaaggaaatggtggtcctgacaccatcaagaagatcaccaccattgaaggtcagttaattaatgttacctttaattttttttatttgtaagaataaaagaataaaaaacatgtaccaaaatttacaccaactcatgtacttatatattgttcagctaattgagttagatgctttgattaatattatcattaattaattcaatacaagatattttcttgaacttatatataaacaaaaataactattttcacacagagttataattaaataaatgatattgtaataataatatcattaaataggaatgaagttacttanatgtacttatatttatatttgagtgttagatagagtaact

SEQ ID NO: 15318 - DNA, 311 bp, Glycine max
  unsure at all n locations
aaacaaatccatgtatggtttanagcaatccnccacgcaatggaataggagacttgatgaatttatggctcacataaagtttcatagaagtcactatgataattgtgtctacttcaaatttccttctaaagtcgagtttgtgatattgctattatatgttgatgatattttgatagcaagtaatagcaagagtaaggctgagaaattgaaatctgagctgagcacggaatttgaaatgaaggatttgggagcagctaagaggatattgngaatagaaatcaaacgggatagaacaaagaaattgtggatct

SEQ ID NO: 15319 - DNA, 353 bp, Glycine max
  unsure at all n locations
agcttaaaggatgtgaacaaattagcatgggcagaaatgtctccgcattgattggtaaatctgttccccaaattcctgaaaaatgtaaagatccaggtacattcagcataccttgtattatagggaatagtaagtttgacaatgccatgctagatttaggagcttctgttagagctatgcctctgtctatttttaattctctatctctaggtcccttgcagtcaactgatgtggtaattcatttagctaatagaagtgctgcctatcctgttggtttcatagaagatgtcttagttagagttggtgaactgattctccctgttgatttttatattntgaatatggaggatggg

SEQ ID NO: 15320 - DNA, 416 bp, Glycine max
  unsure at all n locations
cggtgacaaaggcatatgggaggccttacttgcatatgaggtgtttctatgtgaacttctccaccttattagttgtaatttctcacagtggtcttgcctcgatcccttgngtgaagtaatcgattgccattagtaggtatttaactgttcttggggcctttaacagtggtcccagtatgttcattcctcacatggcaaagggccatgaggagctcacactatggagattgtccggaggggtgcatggaatgcttgcaaactcatggcatcatctgcatctctttgtaaagtcaagggtgtttgccctgaatgttggccagtagtagccaacacgcaccacctttgttgaagggatcgtccccagtatggagatcgaatattccatcgtggagtcctctcatgacataatttgctag

SEQ ID NO: 15321 - DNA, 385 bp, Glycine max
  unsure at all n locations
agttttgtgcaactgaagcatgggaagaagacattctatgctaggcatcattgatttctcaaagaatatcacccaaatcgttggttgaaaaaaacttttaatggaagataggagtttggatttgccccgataccaataacagaaaaaaaaatttatgagcgagtggaggaaatatgtactatctttggaaagacccaaaagaaggatgcaaatgagaaaaacaaatggaaaaagaggtctatattctttgatcttccatattggtttgtcctanatgttagatattgtattgacatgatgcatgtggagaaaaatgtatgtgatagtttaatcagcacacttcttaacattaaaggcaagacaaatgatggtttgaatgctcgtc

SEQ ID NO: 15322 - DNA, 308 bp, Glycine max
  unsure at all n locations
tcttggatgcctaagtgtggaccctctagggcaatcctccatttccatttattttgagccccatgaatgtcatggcctagcgtagctcatgtgtactacaccttcgagtatggagccccgcgaatgtcatcgtctagctctattagccaattctccattccacacttttatttggagccccatgagtgtcattgcctagcgctgtacatgtgtcctccaccttcaagtctggagctatgcttcatgaatgcctaagngtgaaccctcttgtgcaatgctccattctccacttttattctgagcctcat

SEQ ID NO: 15323 - DNA, 412 bp, Glycine max
  unsure at all n locations
cactcaagctntctcttttgtgcaactatctcatcctctttttcaggtgtagaatgaagcttgtcttgttttggtgcaggtgctgctactggtggagacacttgaatttggattccagacctcaaggtgatggcactcacattnttcagattctgcacagtttgtcaaggatatttgtcagaattttgngactgagcttgtgtcaattgagtagccatctgccccatctgatttgtcaaactctgaataaaggctcttgtctcttactgacattgcatattctggatggtcatttgcctcactaactcttctaaggaaggttgaggaagagcctcagttgcttggtggatttgttgagactgccgctgtattggaggaggaacatatggcttgcttgtaccagcaacattct

SEQ ID NO: 15324 - DNA, 503 bp, Glycine max
  unsure at all n locations
cctctctattggggaatcacaactgatggatatgtagcatttgttatgatttagttggtaaggttcctctctaagagcaaaattataatctaagcaagttcggttaggctctcaagtggttgacaagtctcgtttaagtggtctttttggccttggttaacaacaaaatcgagtgttaggtgcaaaaattggaaagctccactacacataatagcagtattatttatttcaatatttgtttttgcattcatggttagtttgcttattntgtctgtgtggctctcttcatttatgaactntgagacttatatgttatgatatatttcatctatttgatgcgatgaactatcangtggaagggtcagcagtccttgcaggcacagagtagaagatccatcttcaaatagagtaccgtgtgatgcattaatggagtaatgtgtttatgtgcttgtgacagtaagtcttgcatgcanggccatgtaaatacctttaatgataactat

SEQ ID NO: 15325 - DNA, 326 bp, Glycine max
gacattcatatatcaagtatcataatattatcataaaacataagaacataaaatatcattattataattcaagtcatttaaacacatgcataataattaatctacacacacacacagttagacaaagtacataaattctctgtaaacatacagtatttgacaatttaaaatgtaatattagaataacattatccaaagtaagcaattcttaaaaaaattatcatgtctttataatctccactaactttaatagtaactttaatagatgaaatgtagctgtattagcagatggataatcatgcatattaatgacttgaatagggata

SEQ ID NO: 15326 - DNA, 398 bp, Glycine max
  unsure at all n locations
agctttgagaaaattcaaacgacaataactttttactcggatgtctgattgagtcccgaaatatatcgagacgctcgaaattgaataccgaagcgctaagcaaattcaaacgacaaaaactttttactcggatgtctgattgagtcccgtaatatatcgaaaagctcgaatgtgaatgtagaagctctgagcaaattcaaacaacaataactttttactcggatgtctgattgagtcccgtaatatatcgagatgctcgaaatggaataccgaagctctgagcaaattcaaacgataataactttntactcggatgtccgattgagtcccgtaatatatcggaacgctcgaaattgaatgtagaagctctgagcaaattcaacgacaataacttttac

SEQ ID NO: 15327 - DNA, 492 bp, Glycine max
  unsure at all n locations
gctttcatatattacgggactcaatcggacttcctattaanaagttattgtagtttgaatgtgctcagggcttcggtattccatttcgagcgtctcgatatattacgggactcaatcggacatccgagtaaaaagttattgttgtttgaatgtgctcagagcttcggtattccatttcgagcatctcgatatattacgggactcaatcagacatccgagtaaaaagttattgtagtttgaatttgctcacagcttcggcattccatttcgagcgtctcgatgtattacgggactcaatcagacatccgagtaanaagttattgtcgtttgaatttgctcagagcttctacattcaattgcgagctnttcgatatattacgggactcaatcagacatccgagtaanaaagtatgggtcgttgcaattgctcagagcttcagtattccatttagagcgtctcgatatattacaggactcantcagacatccgag

SEQ ID NO: 15328 - DNA, 519 bp, Glycine max
  unsure at all n locations
gctatctatgcttttacctcaaattttattttggtgaatttatctatcaaagcattcaccctcaacatttaagagacttgtgagttntaccttctatcaatttacacataacataatttcactttntaaccccaattntttttttggcaaattttaccctgatcttttgttcttactaatggataatgataggaataaagtaagcaagttttcttaaaagtcaagagtaaaatgtgtcaaattaattntttgaaaataaaattcgccacaaaaaattgcgggtaaaaagtgtaattaagccaaattaactactattttcatcttactttttctttgtctttctaaaacaatatatgacaactattattgtgaaacggagggagtaacattatccattcttactaganaannaatattcattcctttgtatattacaagaaatagctatgataaccgaagaaatatgagttntgcttaccatggtattgatatgaagtatctatcacacaagatcatgac

SEQ ID NO: 15329 - DNA, 484 bp, Glycine max
  unsure at all n locations
atggtatggtatagagaataaaattattatgttgtccctttgttnttcttcttcatcatttctcaattaattntcttccttaacgcatttgcatatgcaggttgagaaccatgaaattgacacacaactgatggngaaggtgaagcagttgatcaatgcatactatgaggaaaacctgaaggaaagcttctaccagtctgagatagccaagaggttggagaaacagcagaacacctctgatatagattgggaaagtaccttcttcatttggcatcgccccacctctaacatcaatgaaatttcaaacatctctcangagctntggtaagtcaatccatatatgttcctttntctttntttttacctacatgtattctcctttagagataattntgattgagacacagttaaacactanatgtgaatatttctccanacatanattcanactttgattaccatgtggtggaaactaacccttatg

SEQ ID NO: 15330 - DNA, 438 bp, Glycine max
  unsure at all n locations
accccttgaactacttcacattgatttatttggtccctcaagaactatgcgtttatgtggaaattactatggcttagtaatagtagatgattactcaaatttcttggactttgtttttgaaaaccaaaaatgaagcttttgatgattttcacaaacttgccaaggtgattcaaaatgaaaaaggtctcaacattgtttcaattagaagtgatcatggaggtgaatttcaaaatgacttttatgaanaatatgaaattcaccataatttttctgccccaagaacatctcangagactggtgttgtggagaggaaaaatagatccattgaataatgtgcaagagaccttctatatgaaacaagggtacctaagtactatatagaagaatgtatacatacgtatttgttcaccttgaacagagtacttattagacctatct

SEQ ID NO: 15331 - DNA, 417 bp, Glycine max
  unsure at all n locations
gcttctacattcaatntcgagctnttcgaatattacgggactcaatcggtcttctctattatttagttatcgtagtttgaatttgctcagggcttcggtattccatttcgagcgtctcgatatattacgggactcaatcggacatcagagtaaaaagttattgttgtttgaatttgctcagagcttctgtattccatttcgagcatctcgatatattacgggactcaatcagacatcggagtaaaaagttattgtagtttcaatatgctcagggcttcggtattccatttcgagcgtctcgatgtattacgggactcaatcacacatccgagtaaaaaggtattgtcgtttgaagttgctcagagcttctacattcaatttcgagctgttcgatatattacgggactcaatcagaca

SEQ ID NO: 15332 - DNA, 391 bp, Glycine max
  unsure at all n locations
agcttgaataagcgatctaagtatttaataatatttagaatatgttttgaattccatctattaattaatagtaataatgttgaagtttaaatctgtatacgttataagttaattaaaccccattatcattattgcaacgaaaaagcattaattaaatgcatttattaggcttaaacattaaatgttgtaattactaaaaaaactaagtatttgttaaatggttttcatattgtcaaagggatttaacttaggttaggttaagcgaacgaattattgtaaatttttttatctttaattcctaagaacaaaanaattaattttatattntaaaattntattattatcataacattgatgggaaactaatacattacttagacattntttatta

SEQ ID NO: 15333 - DNA, 385 bp, Glycine max
agtttaattggttcaggccggtttggacaagtctacgaaggaatgctacaagataatacaagagtagctgtgaaggtgatggatacaacgcatggtgagatttcaaggagctttagaagggaatatcaaattctgaaaaagattaggcacagaaatttaataaggatcatcacaatttgctgtaggccagaatttaatgcccttgtttttcccttgatgccaaatggtagccttgagaagtacctatatccaagccaaaggttggatgtggctcaattggtaagaatctgcagtgatgtagccgatggaatgtcctatctgcaccattactctccagtgaaagtagtgcattgagatcttaagccaagcaatatactccttgatg

SEQ ID NO: 15334 - DNA, 379 bp, Glycine max
  unsure at all n locations
agttttatatactttccatttttatataataggactatgaaagttttacctgaaatgttgaacatataacaaaaatattgggatatattttacacaaatcatgttggccaagcttcatgcgtatgttttgtactattaagtcaatggcaacatcattatctcctccactcgggatgataatatcagcatactttttagttggcaatacaaaatcttcaaaacttggctttacaaatctggaatactgaacaatcattntgtatttagtcaaggaggactttaaacatttttaaacaaaaacaactttgaataagttatatgctgaaaagaaaagctacaagaatcaataaaaaaatgttcaactaggggattgttagta

SEQ ID NO: 15335 - DNA, 374 bp, Glycine max
agcttctaatctttatacaagaatgaagctctgataccacttgttagacaagtggcctcagatatcttaagaaggggggttgaattaagatattccaaactactttcccaattaaaaaaaactatttcactttttattcaagttatgaattcccttaatgacaatcttcttaaatattgattcaaataaaacaatttgaatatgaatataaagaaataataaataaaggagattaagggaagagaaagtgcaaactcagatttatactggttcggccacacccttgtgcctacgtccagtccccaagcaacccgcttgagagttccactatcttggaaattccttttacaagttctaaacacacaaggacaatc

SEQ ID NO: 15336 - DNA, 414 bp, Glycine max
  unsure at all n locations
taaatactatgctatttcagagagattatggaagtcaaatcctagtcgtcaagatatatgtggatgataccatattcagtgctactaatgacttgttgtgcgaggattnttccaaacttatgcaggcagagctcgcgatgagtataatgcgagaattgaagatctttgttggacttcaaatcaggcatacaaactatggcatatacacacatcgaaccaagtgcatgagggaacttctgaagaagttgaagatggatgatgaaaaccaaatgataacacttatgcatccaaccactgtacttggactaggcanagaatcatagcgggtggatgaaaagacatacaaagaaatgataggatatcttttgtatgtcattgagtccagacctgacattatgttcagtgtatgcttct

SEQ ID NO: 15337 - DNA, 471 bp, Glycine max
  unsure at all n locations
actgaacatattctcggatgaaatgatgatcgatgtctatgttctcgtatcgttcatgatgagtanggttggaagcaagacatatagcagatttattatcacaaaatagcatcacagagggcacatcaacttcaaagtaaagaagtaactagcttaacctaacaatttcactagtaacagaagacaacgcatgatattaagcttcactggatgattctgaaacagtgagttgcttcttagaacgcctagagagaagggtgtctcccacataaacacaaaggccagaagtggatcttctggtatcaacacagcgtggccaatcagcatcagcaaatgcagtgaagttgacagagttgtgagcatggaagaacaaaccttgttcaggagcagatctgatatactacagacgaatatgaacaacatgtaggtgacgaactctaagtgctttcatatactgacttaatcgatcac

SEQ ID NO: 15338 - DNA, 491 bp, Glycine max
  unsure at all n locations
tacctcaatgcnattttcctctatatccatgaagatagctaacatacaccttnggaaagtggttggtgcatttcacaatccanaggatatccttatgtatgtaaaaacatcaaaaggacaagtgaaagtagttntctcttggtctttaagatctactacaanttggttatagccgaaataaccatctaagaagcaataataagcttgtacggccagccgctctaacatctaatccatgaaaggaaggggaaagtgatccatccttgttgccttgttaagaattttataatctatgtacattctccatccggtcattgttgttgtgcgaattaattcattnttctcattcttaacaattgtcatgccacccttcttcagatccacttgcactcaactaacccatgcactatccanaattgngtangtcattctagcttctagaagtttanaacctctttccttaccccttncttcatcacaagaatcaatct

SEQ ID NO: 15339 - DNA, 357 bp, Glycine max
agcttctaggccttgtggagcttcttgcctctactgcttgaactgcacttgcaagcttagcttgaacttcaccagtaacatcatcagggtctggatcacttaatatttctgcattgatatgcatcattggcttcttgcttggatcatgcttgtgcttcatccatgtgttcagcttatcgaattggacatccttactaaaaactattagattcgctcttggatctaagagtttgtatgaccctatgggattgtagccaacaaagatcatgtgttcactcttgtcatccaatttcgcccttgattgatcaggagtatgtcatgaacatgatgaaccacaaactctcatatgcctcacag

SEQ ID NO: 15340 - DNA, 502 bp, Glycine max
  unsure at all n locations
gctttctctgacacctacattcctatacgatgaaaactntgtttgtatacacacgtattattataaaccctgtctctttatatcaacacggtctatataaaacatctattccttttcaaagatttctttntcctttntcaacatacactcgttgttgtataaaacaattttctttatatacactcattgctcacacaccagaatttcttttcacacattatttatacacacaaaatcttttcatacactgtntatatacaaaaactctnttcttttctttatataagatatgacatttgttcacaacgcctctntctttntctattcttggtgttatcatgatgtttgttcgttntattntaggacgacgttcctaaatgaaaactctacacggttccggaatttaacanacattatcgacaataacgaagtaagcactanagcaacagttcaacataatgtatgcacaaaacanatgacaatcaaaacaacataaacaaac

SEQ ID NO: 15341 - DNA, 484 bp, Glycine max
  unsure at all n locations
acattgatcttagcactagtctcttccagactatccttgatggngatgggaacacgatccanaagctatgctagctccatcttctcatcttgccttactgttacatacttgaattcttcactcatagagaacaatcgacaaagctctatgtcccccattgtaggcttcaaatgctcgctatatgtggatatggatccgtgtgttatgtagtagtagctggcaatacgacccaagtcagtgacctgaaaatatccactcttcctatcatacttcaccaaattatttctatccaagatggttgcagccgtatgaatctgcaaaatttcagcaagatataaagatcanaatcagccaataaataatataagacaggatgaacaggcaagaaaaanattcaatattgaatatcatcngaaattcatttaagaaaaaatttgaaggagataaatcagactaccaaagaagaccaagaacctatctctaa

SEQ ID NO: 15342 - DNA, 486 bp, Glycine max
  unsure at all n locations
ggaggaggatgtctctgcacctttacgcanagggccttgttactattataagagaactntggaagggaaggagtatgttcaatattgcaggcgccttatatctgataaccaaaaggtgccatatgtgcatgacatcatgcccacaggacctgaagctcctccggagcatgttattttggatgtgaatgttaaggcacaacatcaccaatactgcaccaatactacagtattggtggctttaaggttagatcatatcattattaatggcattttttctcactttnttctggcttgtttcctgacttccaagttctgacctgctnttattntattccaaacttcacttcttttcaggtcagcccanataacaagttggtagcatacgccgaagacaccaaaggagatgaaatatatactgtatgtcattgatgctgagactcaagctactattggagagcctctttgtggtgaacatcatactttgat

SEQ ID NO: 15343 - DNA, 497 bp, Glycine max
  unsure at all n locations
cggacctatgatactcagcttggtatctccttcttcactacatcaagaatcaccgggttatgtcttctctgtggctgtcttactggtttagctccatcttctaaatttattcgatgcatacatgtggatgggctaataccaggaatgtccgccagggtccagcctatagccttcttatgcttcttgagaactgacaacaacttctcttcttgctcatcagcaagggaggcagatataatcactggaaaactcttgctatcatccaagtaagcgtattttanatttgatggcaaaggcttcaattctggtgtggtcggctggacagtggtagaaggagatggtttctcagcctttacctcataaagaaagtcagaggtatgtgtacttcctgaaacatggttagtcctatctgactctataaaatcaatctcaagaagtaaaacaccaccaccaggcattcatcaatatcactctcagattactctcacatcaaattc

SEQ ID NO: 15344 - DNA, 390 bp, Glycine max
  unsure at all n locations
agctngatacaaacccttgctacttttgctatactcgaagctatacgaatcatgcctttctttgctactcactctcatataaggatacttcagatggtcgctaaaagtgccgtcttanatggccttatcgaataggcgatatatgctcgacaacctcttgggtttgaagatcgtactcttacacaccatgctttcacacttaacaatgctttgtatggcctataacacgaaccacacgcttggagagacagactgtgttcattgctcttagaaacggtgttattaaagtcacaacggatacctctctctctaaatgacaagttggcaccgaattcattctagactcaatttatgttgatgatagtcttgttgaagctactaacgaatctc

SEQ ID NO: 15345 - DNA, 423 bp, Glycine max
  unsure at all n locations
agcttcaagattaagatggcctcagcaaattccttatttccagaagggaattctatcaatagacctccaatctttaatggagagggttaccactactggaaaacccgaatgcaaatttttatcgaggcaatagatctaaatatctgggaagccattgaaatagggccttatatacccaccacagtagaaagagtttcaatagatggtagttcatcaagtgaaagcataaccatagaaaaacctagagatagatggtcagaagaggatagaaaacgagtacaatacaacctanaagccaaaaacataataacatctgccctaggaatggatgaatatttcagagtttcaaattgcaagagtgctaatganatgtgggacactcttcgataacacatgaaggaactacagatgtttaaagatcta

SEQ ID NO: 15346 - DNA, 441 bp, Glycine max
  unsure at all n locations
tactcaagctnttatcattgcttagaataggatagtacgatttcatacattgtaatctctctgttgatgagtggcccattcaaaagtgccatatgtctatgggaaggatattgcacttacggtgaacaacggttgaacatatagtctttggggttagctggtctggtattagatgataaagaccatgtctcgcttcaattataccaatcttcatacgtttgttcgtatcctgcaacatgcatgaattggaagaaaatatcaatgcacagtcagtagatgacacgagttttgaaatggaaataatattgaaagcgaatgtgggtcttaataatacattaaacagcgttatattgggtgagaggtgtacgacttcggaatgagtaacgtggacatgatggccgttatgaagctttactgtgactgggttgatgcattcatatg

SEQ ID NO: 15347 - DNA, 431 bp, Glycine max
  unsure at all n locations
agctntgagcaaattcaaacgacaataacttttgagtcggatgttcgattgtgtcccgtaggatatcgagacgctcgtaattgaaaacggaagctctgagaaaaatcaaacgacaataacttttaactcggatgtccgattgaaccctgtaatatatcgagacgctcgaaattgaaaacggaagctctaagaaaagtcaaacgacaataacttttgactcggatgtccgatatagtctcgtaatatatcgagacgctcgtaattgaaaaccgaagctcttagcaaattcaaacgacaataacttttgacacggatgtccaattgagtctcgtaggatatcgagacgctcataattganaacgaaagctctatgaacagtcaaatgacaataactntcaattcggatgtctgattgactcccgtaatatatc

SEQ ID NO: 15348 - DNA, 334 bp, Glycine max
  unsure at all n locations
ctggaactacttcacatggacttgatggngcctatgcaagttgaaagccttggaggaaagaggtatgcctatgttgttgtggatgatttctccagatttacctgngtcaactntatcagagagaaatcagaaacctttgaagtattcaaagagttgagtctaagacttcaaagagaaaaggattgtgtcatcaagagaatcaggagtgaccatggcagagaatttgaaaacagcaggttcactgaattctgcacatctgaaggcatcactcatgagttctctgcagccattacaccacaacagaatggcatagttgaaaggaaaaacaggactc

SEQ ID NO: 15349 - DNA, 316 bp, Glycine max
ggatatccatctaaatccagagcatgcaccaaaatcatattcaaacgcatatccggcacatgttgcatgcccttcaatcttagtgtgccaccattattggtttgaatgcacacatcaccaatcccaacaatgtttgtaatgctactattgaccatgttcacttttccaaagtctcctgctttatacgtagtaaagaattccttgttggaagtggcatgataagatgatgttgagtcaatgacccattcaacacatgaatatgaaacacggcactattcatcttccacagagatcctgtgggtacaagtgtgaagtg

SEQ ID NO: 15350 - DNA, 344 bp, Glycine max
tgctctattcaatgggagtgacaagaatatcttcagactgatcaacacatgcacagtggccacagatgcctgggagatcctgaaaaccactcatgaaagaacctccaaagtgaagatgtccagatggcaactattgggcacaaacatcgaaaatcttaagatgaaggaggaagagtgtattcatgacttccacatgaacattcttgaaattgccaatgcttgcactggcttgggagaaagaatgacagatgaaaagctggtgagaaagatcctcagatctttgcctaagagatctgacatgaaagtcactgcaatagatgaggcccatgacatttgccacatga

SEQ ID NO: 15351 - DNA, 429 bp, Glycine max
  unsure at all n locations
agcttggcaaacatagctggcacagaaaggatatctcctctagatagaagcataatatcatctgcaaaagccatatgagatagttgaatacctgcacagttgggatgaaatttaaaattggcatcatccttgaggctgctcatatctctagaaaagtactccaaacaaagcacaaacagataaggggagagaggatccccttgtctaagaccccgctgccctttgaagtggccataaatggatccattgactgccacactaaaggaagtggaagaaacacattccatgatctaagtacagaactgggctgggaagccaatggacttaatcatccaatccaagaattcccaggaaatggaatcataagctntatgcaagtcaattttcagtaggcactcgacgtgtattttcaaacaataataatgtgtg

SEQ ID NO: 15352 - DNA, 396 bp, Glycine max
  unsure at all n locations
agctttctattctaacctcgaaattcaagagagcactttgattnttgaggtttatgggataaaaatggtcattgaccaatccctattctatgacttgacccaattatctagtgagggtgtaccatttgaaggtgcattgaatgatgattggaaatttgatttctctgtgcatgatgcccaccggttggtttgcaccaatcaagcggatataaccgaaaggcttattgccggatcattggctnttgaaagccgcatccttcactatctcattgtgcgtattttacctccaagatcttcaaaccttgcacaagtttctgaagaagatcttattgttatgtgagcttttcataccggccgaanaattgattggacacacttaatccgatatcgcatgca

SEQ ID NO: 15353 - DNA, 413 bp, Glycine max
  unsure at all n locations
agcttggcctatcccacatcacatgttaggtgcaatgcaattgcatacaaatgctgacttttccttttaaaaaaataataaaacaaagatatttgcgggtcccatgttgctcaaaacgtttcgttntcagttgtcacatcttctgtaggtacatgaacatgtcctgcaagggcgagagctggcccatttgatactgaacagtgccaaaaaggtaatcatccacggaaaggttattatcgtccaagtaattaaactgaagatcaaacgcgttntctagctntaggtccagatcatcgttccacttggtgtcgctctgcacctgcctctcgcacgtgacatcgggcgaaaccacgtgctccgaactgctcgaagtcgtgttcaaccttggcaccgaatccgaagtctacatgtac

SEQ ID NO: 15354 - DNA, 416 bp, Glycine max
  unsure at all n locations
agctttaactatttatggactggttgtagcattagcacttttatttgctaatccttttgtttaatcctaaaaaaatagaaatacatantcctttttccgtggacttgctttaccggtcttgctttttcgaattctatttatattaatatttcactcctataattctttatccgttcggacaagaacacaggggaaggactaattgaaaggtgaagaattcacatactgattcgccctctttcttctctttcttagtccaatgacccccccttctttttaagataattattctcaagtgttaaaacttgagagatcttgcaatggatataagaactggtatctaattcgaataagtatcattcttttgggaatccttcaattgattgaccatccaaatatatatggaatatatatat

SEQ ID NO: 15355 - DNA, 447 bp, Glycine max
tcttacaaagcatacggctttctggatgtagatgatgatatctatacagatggatcttatatatctatatatctatagatagatatatagatatagatatatagatatagatcatacaatgaagtaccgcacgagtgggtatataggaatccaaatctgccgaatcactcatgttatgatcttctacatcctaggtcttcccgttccttcatctggcttatgttcttcatgtagcattcagactgaatgactctatgaaattacgtcgctacttccacatggtacgggtaacgtaggagacatctctatttttccggggggaatccttatattaccacagcttaactttcattcgcctctgacatcacatgaaaggataacccgcctccctcttgaaatttaaacaaaggtgttcggtctgtcgtgttgaacaatttgctttcatat

SEQ ID NO: 15356 - DNA, 407 bp, Glycine max
  unsure at all n locations
agcttgagcttgacttgtttaactcatttataacttatgatttttgcttttacaatttgttaaattattttttaactttatcgattaagcatttgataattattttaataccagataattatttactacttaaaaaatgtgcttaacatgtgatatgtggaattaaatctttttagactattaaaatagttcatagcttattgacctttacaaaaaagaaacttcanaatcaatttaacattctcaacaaagttcaaattacatattttcataatcaatatataaataacaaagaccaataaaatcttcatcaattnttgtatcaactaaatcatttagacctcaatgaaacatanacaacaacacctttcatgttttctaatttcaactaaaaaatgataaatagt

SEQ ID NO: 15357 - DNA, 432 bp, Glycine max
  unsure at all n locations
agcttaaccaatgganaaagagtcatcttaccttcaacgtttgttgggagcccacgttatatgaatcaactttactttgatggtatggcaatatgcagtcatgttggttttccaaatctttntattactctaacctgtaatccaaattggcttgaaattcgtagattactttcagctttgaatctcanaccaacagacagaccagacattgtatcacgaattttcagattaaaatatgaacacatgctgtcaaacttaacaaagggtcaattactgggaaaagtggtgcatgtaagttgactattcattttatacttaaatacaaatataagttgcttatttggccattnttctttgttctataatgcagatattaatggctaanatattacaatntagccaacacttttatagatatgagatacagaatta

SEQ ID NO: 15358 - DNA, 307 bp, Glycine max
tctcgtagtacccctccacgtcattcccaaacaccgacgcgagccccatcccgtgataaccacgtgcttcttcgggtccttctgccactacggggcggacaccttcggcgccactgtggcggacacgaagaacacgcgcttcgcaaaggaggcgcatcgcttggcggcggcattgttggggccccgaagagggtccaagggagaaccgcggagggtgatgatcatggaaggccaggttgttcgttagagcctcgatggcgccgccgcctcgcatggtggttcccgcggtggtttgggggttggagat

SEQ ID NO: 15359 - DNA, 396 bp, Glycine max
tagcttaagcttcttcaactgcacaaggctcttaatatttgaagagtatccttatggaaccttcacctgacacagatactgacaaaaaattatcttctcctttttggacaaagtatgacaatccgggggcaagtaaatcttctttccatcagaccttgtatgcaactgtgatcgtatccccatgtcagctagatcttgacgagtattcaagccatccttcttcttgccttgaatgttaaggagcatcccaatcacactgtcacatacatttatctccacatgcataacatcaatacaatgtctaacgtccagatcaaaccagtacgggagatcaaagataatggacctcttcttcatatgcaagtcttactcttaatcttcttttgggactttcca

SEQ ID NO: 15360 - DNA, 417 bp, Glycine max
  unsure at all n locations
agcttgtaggcctaggatcttcatcaatggattccttttctttttggaagatgaatggcagcagaatggagaaggaagagagagaggagacgccacttcaaggagaagatgagtctagaagaagctcaccaccataggaggccatggataagagcttggaggaagaaggagatgaatgaagggagaggaagagaatagcacgaaattntatgctctaaaagagctctgaaatctgaagtttaattttcaaattatcaaagttgaaaaaatgcacacacatgacctctatttatagcctaagtgtcacacaaaattggagggaaatttgaatttctattcanatttcacttgaatttgaaattgaatntatggagccaaattttggagccaaaatttcactaattatgattagttaat

SEQ ID NO: 15361 - DNA, 384 bp, Glycine max
cactgtatagactgctggttttatgtattacagaccaagcgatgtgaagtgttaaccgcgcatattggtaagactgacaatctcttctcttctttttcttctcattcctctcagtcgaattcttcaactgaaaaataataggaaaaattccgtcaatacaaatttgcaaggtagaagagaatatataaaaaggttgttgcttaacgatcagactcaccataataacaagaatccggacaaaaactgcgaccaaatcggtaaacaaggtcaaggcatgctgtacatagtccagatcgcccaagtgtgccctctcaacctattcttgggtgtctactacaatgtaacctacaaacaccaatagcccaaagtacaactgcaacacca

SEQ ID NO: 15362 - DNA, 348 bp, Glycine max
  unsure at all n locations
agctnttgaacctactatgtgattttcagtcagttgagcacccgtcacattcatgcgaaaaaatctgggaaattgctaatgaagaacttggaaatatagacccatacagtctctttactcctccgtgccaacatgctaatgttagccagttaagtcggctggtgagaagaaagcatgtgagtggtaacattttaaattttttagtatactatacagggcctgtaacgggtttgtgatgcagatcattattaatgatgtgttatgcttatgtcatgctacaaagaattggtagactcagtgcagagtatgatccatgcactgaanagcactccattgtatacttcaatc

SEQ ID NO: 15363 - DNA, 439 bp, Glycine max
  unsure at all n locations
tagaatanatgtgaactgcgtacnctntggtaagaacctccataagttgactntgtgaaggtgcatatggagtacaaatcaagcagcaattgagcttttccttgataaaatgtttgtaaacttctacatgctttgttcgagcatgctaaacaggattatgagctatgctgatagttgatttattatcacagtatggtttcattggtccatcccattcaatcttcaagttctttatggacacaccaaattgactttttaatcgttgagaagatattntaaaagacattgctttcttcagatttttgtttaagaacaaaacccaagtgatctgggtacaatcatcaataaaagtcataaaccagcaagcccctgaatattttgaataggagatggccctcanacatcagtatgaacagaataaagaggaaatatacttttc

SEQ ID NO: 15364 - DNA, 383 bp, Glycine max
tgagggaaaacttgatgcattggtcaacctagttactcagctttccatgaatcagaaatttgcatctacgcctgttgcaagagtatgtggtctatgttcttctgcagatcaccatacagatctctgtccttctttgtagcaatctggagtcaatgagcaacctgaagcttatgctgcaaacatttataatagaccctctcagtagcaaaaccaacaacagtagaataattatgatctttcaagcaacagatacaatccaggttggaggaatcatccaaatctgagatggacaagtcctccataacaataacagcatgtcccttcctgtcagaatgctgctggtcctagcaagccatatgttcctcctccaatgcagcaacaac

SEQ ID NO: 15365 - DNA, 462 bp, Glycine max
  unsure at all n locations
tcaacatcagaccacttccagggtgctggaactacttcacatggatttgatggngcctatgcaagttgaaagccttggaggaaagaggtatgcctatgttgttgtggatgatttctccagatttacctgngtcaactntatcagagagaaatcagaaacctttgaagtattcaaggagttgagtctaagacttcaaagagaaaaagactgtgtaatcaagagaatcaggagtgaccatggcagagaatttgaaaacagcaggttcactgaattctgcacatctgaaggcatcactcatgagttctctgcagccattacaccacaacagaatggcatagttgagaggaataacaggaccttgcaagaagctgctanggtcatgctccatgccaaagaacttccctataatctctgggctgaagccatgaacacagcatgctacatccacaacagagtcacact

SEQ ID NO: 15366 - DNA, 442 bp, Glycine max
tgaaggacatgcacaaagtgtgactatatgatgtggcaatggtgtgtatcaagcaaatgctcacctcccccttaggctggaccaaactttaattgggttgggcttctcccaattcaattaaatttatctcccaacacacatcaaatagggcacttaatgcatgtgaaattacaaaactacccctaatccagaaactagtctaggtgccctataatacaagagctaaaaaatcctacattactagggtaccctccctacactatggagccctaaatacaagtcccaaaaataatgaaatcctaatctaatatgtacaaagataagtggtctcatacttagcccatggacccaatcttcttggagtcttctatccaataccctcgagggatagtgatgtagctccatgtggagcttgagaaccttgatcttcttcatcaatgga

SEQ ID NO: 15367 - DNA, 428 bp, Glycine max
  unsure at all n locations
tctggtgggacatcttgacttgctgtccaatctgacattcaccacagattctgccttcttctattttcagattgggaatgcctctaacagcacctttgtcaatgattttcttcatgcctcttaagtgcagatgtccaaatctttgatgccatattttgacttcatcttctttggagaatagacatgtggaggagtaactggtttcttgaggtgtccataggtaacagttgtcctttgatctgctgcccttcattaagacttcactcttctcatttgtcaccaagcattctgactttgtgaagtttacattgaatccttcatcacacatacgactgatgctgatcaagttcgcagtcagtcccttcaccagcagtactttgttcagactangaagtccatcatggactagctttcccattccagtgatc

SEQ ID NO: 15368 - DNA, 317 bp, Glycine max
cgccttataacggtcctctttgcttatattggttaaaatggaccattcaaagcataaaatcaacatataaatttatcgcttttgcaagaactacgtaggtatgattttctcatcacaattgaggatacgtaggagcaaaagccccacttttgtcgaccaccccaagagatcgttaattatccaacgccttaacgcttctctcatttcaaaaatcaagagatcattaatggtccaacgccttaatgtttctctcctttcaaaaccaagaaattgttaatggtccaaacgccttaacgtttctctccttttcaaaaatc

SEQ ID NO: 15369 - DNA, 436 bp, Glycine max
  unsure at all n locations
agcttgcacttggaaataaagatagtatctgaataatttaaactacacagcttcaaaagctcagcagactgttgtttcaatataggattgcaaccactctgaatcacgagcaggagtttcgcagcaagccctgcatcaaccgcaatcgacgagcactcatcaggtgaaagcttgcacacggaccatagaatcgacaaagcatactgagtgcagttttctgagatcctcatcaacagcttcaccatgatgggtatggtgttagagcaatccttcaaagccactctaccttcggngaccgacgccaacgcatccaaaacacanagggccaattccgtacaatcaggctccatgccagacaacaattcaaccaactgagaaacagccccaatgctcacaagcaaattcctaacttccttatgcanacanattgttctga

SEQ ID NO: 15370 - DNA, 429 bp, Glycine max
  unsure at all n locations
tcttttaccgtaagagatgtgttccanattatctagctatcacaatcatgttgaaagctaaccaattgattctgaacatgtacttcccaatcagtggtgacaagggtgacagcattaaagcatcatacctccatcatctggatctattgaagaagagtgccgcagttgcagagatcacgagaaagttctcaacaaatgagaacactnttacagtangagggtcttttgctgttgaccctctgacacaggtcanagcaaggctcaacaatcatggaaagctcggggccctcctgcagcacgagatcataccanagtcagtgtttactgtttctggtgagattgacaccaanggccctgataaaaatcccaggtttggattgcaattgccctcaaccttgaggttttattcatttttagaaagtgatcgag

SEQ ID NO: 15371 - DNA, 428 bp, Glycine max
gcacctcttaatgaaattgtttaagaaaaaatgtggggtttaaatgggggagaaacaagagcatgcatttactgcactcaaaggaaaattgactcatgtacctattcttgtattacctaattttaccaaatcttttgaaattgaatgtgatgcatccaatgtggggataagggctgttttaatgcaagaatgacatctcattgcttattttattgaaaaattgaatgagggtgtgcttaattattctacatatgacaaagagttttatgcattggtaagggcattacaaacttgacaacattaccttttgcctaaagtatttgtcattcatagtgattatgagtccttgaagccattaatacgacaagacaagctgagcaagagatatgtcaagtgggttgagtttcttgataatttcctacatgatc

SEQ ID NO: 15372 - DNA, 408 bp, Glycine max
  unsure at all n locations
agctnttatccatggcctcctatggtggtgagcttcttctagactcatcttctccttgaagtggcgtctcctctctctcttccttctccatttcgctgccattcatcatccaagaagtaaaggaatccattgacgaagaagatcctaggcctacaagctccaatggagcttacatcacaacagttcttcttaatgtangccaagttaatggctgtgcttaagctctcgtaggtcagactatcagtggtaactcctctagctctacttagagtagtggtcaaggctangaattcgagcctaaaggagttactttgggcaatggtagaaatctgacctgagaatanggctccaaagttcatgtccatgcccgtgactaatccgtacaccaacccggctctgtccatatta

SEQ ID NO: 15373 - DNA, 274 bp, Glycine max
tgaaggacatgcgcctactgtgaatatatcatgtggccctgtcgtgaatcagacatatgctcaccttccactcatgctgcagcacactttaatagcactgggctactgccaattcaattatagttatctactaacacacctcagatacggcacttactgcatgtgagtatcactaaactacccatagaccggagactactctatgagccctatagtaccacatctaatggaaaatacattactaggcgaccctccctactctatggagccctag

SEQ ID NO: 15374 - DNA, 346 bp, Glycine max
  unsure at all n locations
taatatatcgagactctcgaaattgaacaacggaagctatcgagaaattcaaatggtcaatacttcgaactcggaggtcctattaaggtgcataatatatctaaacgctcaaaattttacaatggaagctctttggctatacaaatggtcataacttttcactcgaaggtccgattaaggcgcataatatatcgagacgctcagaattgaacaatggaagctcttgagcaattcaaatggtcataacttgtcactcngaggtccgattcagctgcataatatatcgtgacgctcgaaatngaacaatggaagctcttgagcaattcaaatggtcataacttgtcac

SEQ ID NO: 15375 - DNA, 465 bp, Glycine max
tgtccaaagattggttcattaacttattcttggacaaaaactggttcttgagccacaatcattagaggtgataacctttatgttaacttcaaaacattaaaggtcttttagtgtccatcccatgttcgtgatttgttatttaattggaaacttgagcttcatcaagtttaatcatttttccatgactagctctacaagaagtttcctttttagaaatgttactcgtcttgccacaagcactgtatggtcagaaggttggtataaacaatatttcataatttctttgggatacccaatgagtctacatttctcataccttggctcaagtgtgtctatttgcaatctcttaatgtaagtgggacaatcccaagccttggtgcgtttgagattcattctagccctttccatatcacatatggagttgtacatatacttttctaagacatgatgtatcacatacacttt

SEQ ID NO: 15376 - DNA, 387 bp, Glycine max
  unsure at all n locations
agcttcttagtctcagatgatgcagctgagtttgtagctacctcatgcactcctctaatgactatggcatcatttctggcgctaaactgctgagagttggaagccatcttctcaattaaatttctggcttcagcaggagtcatgtctccaagggctccaccactggcagcatctatcatacttctctccatattactgagtccttcataaaaatattggagaagaagctgctccgaaatctgatggtgagggcaactggcacatagttttttaaatcgctcccagtactcatacaggctctctccactgagttgtctaatacctgagatatctttcttgatggctgtggtcctggaagcanggaaaatttttctaagatactctctt

SEQ ID NO: 15377 - DNA, 367 bp, Glycine max
  unsure at all n locations
gagcttgacaagctgccatagcagcaacaacatattctgcttcacatgttgacaaaacaactagactttgcttctttgagcaccaagagattggtgatgttccaaatttgaaaacatacccagcagtgcttttcctgtcatccttatcaccacaccaatctgaatcactataaccaaacaattttccttctatattcttctgactgtaaagatataaaatgccaagatccaatgttcctttcacatacctcagaatcctctttgctgcctggaagtgaggtgtcttggtttctccataaacctgcttatcaacccaacacaataggcaatgtcaggtctggtgttacatangtacctcaatgagtct

SEQ ID NO: 15378 - DNA, 434 bp, Glycine max
  unsure at all n locations
agcttgaaggtaaactagatgccttggttaacctggtaacccaactggccatgaatcaaaaatctgcacctgtcgccagactctgtggtttatgctcctctctcgaccaccacacagacctttgcccttctgtgcaacaatctgaaccaattgaacagcctgaagcttatgctgcaaacatctacaacagacctcttcaacctcaatagcaaaatcagccacaacagaataattatgacctctccagcaacaggtacaatcccggatggaggaatcatcctaaccttagatggttgaatccttcacaacagcagcagcaacaacaacatacttattttcaaaatgctgctggcccaagcagaccatacgttcttncaccaatccagcagcaacagccccagaaacagcaaacagttgaggcccctccgcatcct

SEQ ID NO: 15379 - DNA, 465 bp, Glycine max
  unsure at all n locations
tcttggggttgcaacagggactaggactatggaccaattccatatttggcaaaggcatcataattggaattctggacaccggcataacccctgaccacctttcgttcaatgatgaaggaatgccactcccaccggcaaaatggaatggccgctgtgaattcactggggagaagacttgcaacaacaagctcattggtgcaagaaattttgtcaaaaacccaaactcaacccttccactggatgatgtangtcatgggacccacacagccagcacagctgcaggaagacttgtgcagggtgctagtgtctttggcaatgctaagggttcagcagttggtatggcaccagatgcacactntgtaatttacaaggtttgtgacctctntgattgttccgaaagtgcaatactagctggaatgggcactgcaatacctcacttggaggaccatctgttcctttctttga

SEQ ID NO: 15380 - DNA, 433 bp, Glycine max
  unsure at all n locations
agctntgagccaattcaaacgacaataactttttactcggatgtctgattcagtcccgtaatatatcgagacgctcaaaattgaatgttgaacctctgagcaaatgcaaacgaaaataattttttcttggatgtctttttgagtcccgtaatatatcgacacgctcgaaattgaatgttgaagctctgagcaaattcaaacgataataactttttactcggatgtctgattgagtgctgtaatatatcgagacgctcaaaattgaatgttgaacctctgagcaaatgcaaacgacaataatttttttctcggatgtctttttgagtcccgtaatataacgagacgctcaaaattgaatgttgaacctctgagcaaattcaaacggcaataacttntttctcgaatgtttgattgagtcccgtaatatatcgac

SEQ ID NO: 15381 - DNA, 123 bp, Glycine max
gctgaagtttcttttggtgaaggaaccatggaaaagcagagcgtttggaatggtttaaccaatttctgagaactgttgggggatgctgaaaacgagattatcacgaatatataagtttgaatg

SEQ ID NO: 15382 - DNA, 390 bp, Glycine max
  unsure at all n locations
agcttgtgctcctgattgtccacaaactgtggcttcgtaatttgcagcagaattgcagaaaatgccctgaagtagcacttcagaaaatttaagtactcagcagtgtgagctatctcaagactatccctaacctccatcaccatctgcagtcttgccggaatcgctgttttcaaccagaaacacaaaaacaaaaacaaaaaaattaagcaaaaacaaaacactaaatgtcaaaacaacgaatactgaaagcacttaaatgccaatacatcacaggcatagttgaatccattntcctacgacaaaagaacatganaataagcactaaatgtanaaacaacaaaaactggaagtgcttaaatgtcaatacaacagaggcatangtgaatccat

SEQ ID NO: 15383 - DNA, 465 bp, Glycine max
  unsure at all n locations
tgccattcactngnacttttatattattctattctattaagtttttnttagaagattgttttattaaggttaatttagtggtaaatgaataattttatgaattacaagtttaaatttctgccataatatacaaaaaagtatatatattttattagagattntatgtcgaattgtaatatacataaaataaagtatataaattgaaaataacttttatatttagaggtaatttttaagattaagctagaatcaatccgaaattgttggattgtataacaatttatcatagtaattattgtttggctaataaggctcttccccttattggattattattagatcactctcgattgtgtaatcttataatttcacgctctaaatatnttttttccacgtgaaaatagtgtatgagagagctcacattaattagtaatgtgattagagtanaacatatatgtagaggat

SEQ ID NO: 15384 - DNA, 413 bp, Glycine max
  unsure at all n locations
agcttgataggttcaagtgcaggtgctgctactggtggaggcacttcaatttgcttgaaaagggttntgaatttgaattttgaacatgtaatcgattaccatatgtctgtaatcgattaccagcaacgaaactcctgatattcaaattcaaaagtcatgacccttcaaattataactgtgtaatcgattatacagacattgtaatcgattaccagtgaagagatttcagaaaatctgtcaacagtcacatattttcattggatttatgaatggccatcaaaggcctataaataggtgacttgngctcgaattntatgagagagttntgctggtccaaaatgtcttatcctctcanaagaaaatgagagagattccaagagaacttcattgccaaatgctctctcaagaagtct

SEQ ID NO: 15385 - DNA, 418 bp, Glycine max
  unsure at all n locations
agcttgtaacataacaggtaattganattttttttttaaaaaaagctaaagcattactcttctcgtagattgtgatcgaaggaaatctacacaaatctggcgtccacctaaccgcttcccgttcatgactttcatcgcccgagcagcagcatccagattgagaaactcaacacacgcagtgccgcggtctataaagaacttaaaatcctcaatcttaccgaatttgcgaaattccgcttccaaatcttcccttgcaacagtgggactaaaaccacccacccacaattgtttgcacggctttgcctgaaacacacaattcatttaattaattaattaattattctcaacagaaagccacattgtgaaatanattatatataaaaaagcgttntcagtttggacacacaaaccggtctgg

SEQ ID NO: 15386 - DNA, 440 bp, Glycine max
  unsure at all n locations
agcttctatataaggtttgttcctaatttctctacaattgcatcacctctcaatgagctggtgaagaagaatgtggcatttacctgtggtgaaaaacaagagcaagccttttctttgctcaaagaaaagcttactaaggcacctgttctagctcttcctgacttttctaaaacttttgagctagaatgtgatgcctctggagtgggagttggagctgtattgttacaaggtgggcaccctatttcttattntagtgaanaacttcatagtgccgccctcaactaccccacctatgataaagagctttatgccttaataagagccctccanacttgggaacattaccttgtttccaaggaatttgtcattcatagtgatcattaatcacttaagtacattagagggcaaaacaagttaaacaagaggcatgcataatgggt

SEQ ID NO: 15387 - DNA, 431 bp, Glycine max
  unsure at all n locations
agcttagagtttctggtagttcattaaatacttgtttcatttcctccaagctcatattttccaaaacggagggtctaggggcaaccctcacaatttcactaccttttggttcctgaactcgtgcgtcggctttaatgactagttcggaattagagtttgcaccacattttattataaatggtgaggacgagcctgtattaaattggagtacattccactgtgcaacgtcagtttcagatccagagcccagatctgttgatggcttgcgaccatgaganatatcttgaatggngtcatcttcttcaggaattgactgtatgataacaaaataaaggatttgggcatcaaagaaaatcaatccanattcattntcatcagtgcagttctttagcatatacctaagctatagtcacaaacagcaaagtaatcaa

SEQ ID NO: 15388 - DNA, 439 bp, Glycine max
  unsure at all n locations
agctntgagcttattcatacgacaataactntntactcggatgtctgattgtgtctcgtaatatatcgagttgctcgaaatggaattccgaagctctgagcanattcaaacgacaataactntttactcggatgtctgattgagtcccgtaatatatcgatttgctcgaaatggaattccgaagctctgagcaaattcaaacgacaataattttttactcggatgtctgatttagtcctgtaatatatcgagcttctcgaaatggaattccgaagctccgagcanattcanacgacaataattttttactcggatgtctgatttagtcctgtaatatatcgactgtctcgaaatggaattccgaagctctgagcaaattcaaacgacaataactttttactcggatgtctgatttagtcctgtaatatatcgagattct

SEQ ID NO: 15389 - DNA, 428 bp, Glycine max
  unsure at all n locations
agcttcttattactcttggtcactaggtcacaagatcaactaggctctaataattcttctaacctagggtggtgactcactctttagaccgataattcttttaatcatactcttaaaagagcaaacaaatttctaatttataaaatatatctttaattctaaacaacatcctanaagtaagacaatatctttttttaaatctacataatattctagagatttaaaattataaatttaaattatttcctaaccgttatgacaagattatagattggctatttagccatggattgattgccaagacaatattactattgaaggagaaattttttttacaaaaatactatgattccacatcttaatcataataatttaatttaaatattctttaattnttaattcttgtttctcttctacacgaataaatc

SEQ ID NO: 15390 - DNA, 441 bp, Glycine max
  unsure at all n locations
agcttgctaaaccatggaagttcctaatatctcccacattttttggggtgggccattcttggatggccttgattntcttagggtccacttggaccccatttttaccaactacaaacccaaagaaatacacaaaaggtacacttctctatatttgcatagagggtgtttttcctaaggactgaatgaacttgcctgagatgtcctaagtgatcatctangctcctgctgtacactaaaatatcatcaaaataaaaaactacaaatctacctatgaaatcccttaagacatgatgcataagcctcataaaggtgcttggtgcattagtgagcccaaaaggcatcactagccattcatacaaaccanacttggtcttgaaagcagttttccactcatcaccctttntcatcctgattnggtgataaccacttttaagatcaatt

SEQ ID NO: 15391 - DNA, 400 bp, Glycine max
  unsure at all n locations
agcttgttatgtccattcctaaggccacatacgttgttatatatttctttcatatataaatatattatatatatttaataatcatctaacaatcatttatatcactcatcataaatcatatttgatataattntaagaataattatcataaaaattaataaatctatcatacatgatataattaaataataatatataattattttacactatcaatacataatctattttatcatattatattatgcccccataatatctttatactcttttccagcgggcacacttaattctggttttcaatagacatgaggatcagtggacgtgcggaataagtgtcattcccttactctcaggaaacagccatatatatcgcgatgatccaaactatcatatctat

SEQ ID NO: 15392 - DNA, 271 bp, Glycine max
  unsure at all n locations
agcttcggtattccatttcgagcgtctcgatatattacgagactcaattggacatccgagtaaaaatttattgtcgtttgaatttgatcagagcttcaacattcaatttcgagcatctcgatatattacgggactcaatcagacatccgagtaacaagttattgtcgttngaatttgctcagagcttctacattcaatttcgagcgtttcgatatattacgggactcaatcggacatccgagtaaatagttattgtcagttgaatttgctc

SEQ ID NO: 15393 - DNA, 441 bp, Glycine max
  unsure at all n locations
agcttgcctttagttgtccaggaaggacaaggcagccgaaggaactagttccgctccggagtatgacagtcaccgctttaggagcgctgtacaccagcagcgcttcgaggccatcaagggatggtcgtttctccgggagcgacgcgtccagctcagggacgacgagtatactgatttccaggaggaaatagctctacggagttttaaaagattggctaagattttgttaaaacataagcacttagacaatgaaggaaagctggagttgctgcacatgatgtccaacgttatgtcaaggaataagatcgggctgcacaatgcacaaggcaagataaaatgtcaaatgaagaattgaagttgcaggatccacgatgtcggatacaatgtcctgacatcctgcccganaatactggagttgctgacaatgcataagtcaagata

SEQ ID NO: 15394 - DNA, 427 bp, Glycine max
  unsure at all n locations
agctntgcttctacacaaatgattaaatgcatganaaacaaactaagataacagaaattataattgggttgcctcccaggaagcacttctttaacgtcattagcttggcacttttacctcactgngtgatcttatgttttggttcgtactttcagaacctcttgacctcttaccattacctgtaagcaaacattgtgttttggagcaggcttatcttcaaaaaataaatcaaaatcaattttatgatcttcaaaacctagctccagcttcctcttccccatatcaactatgcagcttgcggtcaacatgaatggccttccaaatattacagggatgccagtatctntagagatatccattaccacaaagtctgccgggaagataaaatgttntactctgaccaacacatcttcaattactccatatg

SEQ ID NO: 15395 - DNA, 436 bp, Glycine max
  unsure at all n locations
agcttgtgcattattaatgtcaatgataaaaaacagaatatgaatcataccaatttcaaaaccttcatactcaataattgaatcatctggccttttattagccctgtcttcaaaatccattgtgtatgacataccagagcaccctccctgtttgacacctattcttaaacataaatcttgatttcgttcagacctcatcttattcaagtgcttcagcgcattatccgtaagtgaaactgcaggggccagagaaccagatgctggtgcagctganagatattgaggtgggggtgagtgaaagcaaagattaaaaaagtgctgagtgtggcagaaaaagtatttcacataacanacaagtatataacanaattcaaaatatactgtntagctgttgcaatctggttaatgatattaaaacagagtgaatgccaataac

SEQ ID NO: 15396 - DNA, 430 bp, Glycine max
agcttatttataagagcttatatataaacctacaacaaatagtttcatctaacacttctctcaaaagtgctctattttttcattctgaggcaatttttcacagaaagaagagcacatttaattgtgaggagtcgatgcttcagatggactacttgaggagtcacctgaggatggattcaatggtgaaccagctgttagagaaccatttccaccctcactctcagccaccactggtatcttgacagtggctgctctttccatctctttctcgagttcttcctctttacgcaatgcagtaaactgggtatccaaggatttcgccgcagctagccaggcagatacaatcagcagaagtattcctcccaagtatggggttgaattagctagtgacccaaaagtcaagatcataaattgctggataagggcacct

SEQ ID NO: 15397 - DNA, 423 bp, Glycine max
agcttctgttttcaatttcgagcgtctcgatattttacggggctctatccgacatccgagttaaaagttattgtcgtttgatttttctaagagcttcccttttcaattacgagcgtctcgatatattacgggacacaatcggacacccgagttaaaagttactgtcgtttgaattttctcagagcttctattttcaattacgagcgtctcgatatattacgggactcaatcggacatccgggtaaaaagttattgtcgtttgaattttctcagagcttatgttttcaattacgagcgtcctgatatattacgggactcaatcggacatccgagtcaaaagtttttgtcgattgaatttgctcagagcttctggtttcaattacgagcgctctcatgtattacctggacttcatcggacatccg

SEQ ID NO: 15398 - DNA, 421 bp, Glycine max
agcttgacattcatataaaaccttataactaagctgattactatattttagatcgaacttagcgaaaagaatcaaaaagcgaagcagtgtatgtattgaatcggatccgggttacacccatgtcttcgatgatgcacctatcgcgaaagcgaattatctgctaatattaataatttggagctaaaagtcgacagtttgtggaaaaacgcaatagcaacaaacgccgaagatgaatcaaacaagcccaaaaccaaattctgagaaaaattcattcagacccaagctaagaacccaattctcaaaatattaaaatagactagaacccaacttgtaaaaaggggtgttgcgagaatcgaactcgcgacctctcgcacccgaagcgagaatcataccactagaccagacaccctatacaaattct

SEQ ID NO: 15399 - DNA, 430 bp, Glycine max
  unsure at all n locations
agcttcaagattaattcaaatgacaataactttttccttatatgttcgattgagtctcgtaacatatcgagacactcgaaattgactacagaagctctgagcaaattcaaatgataataagtattgacttggattttcgattgaatcccgtaatatatcgagatggtcgaagttgaaaatggaagctcataaaaaatgaaaacaataataattgttaactctgatgtccgattgagtcccgtaatatatcgagacgctggtaatggaaaacagaagctcatagaaaatgcaaatcacaataacttttaactcggatgaccgattaagtcctgtgacatcctggaaatttctaacccggaattttgtaaatggtgcattntgaatggctatatatataagtattattcagtggatgtatataagtatatat

SEQ ID NO: 15400 - DNA, 419 bp, Glycine max
  unsure at all n locations
agctttctcatgttttaagttcttcctcanaactgtcctaagcaaagttcccaatgtcctattagcaacttccatttgcccatcggtttatgggtgacaagtggttgaaaataacaatttagtgcccaacttgccccacatagtcctccaaaaatgacttaggaacttaagtccctatcactaacaatgctccttggaaaaccatggagtctcacaatctccttgaaaaacaaatcagccacatgggaagcatcatcaactntnttacatggaataaaataagccattttagaaaacctatcatacgaccacaaaatggagtctctaccactgcttgtttttggcagccctataacaaaatccatggataaatcaatccanggatactccggaattggcaatggagtatacaatccatg

SEQ ID NO: 15401 - DNA, 384 bp, Glycine max
agcttctagatgagttatgtctgcgaatcggacatcctgtgaaaagttatgaccatttgaatttctcgagtgcttccgttgtttaatttcaagcgtctcgatattttatgtcctcaaatcagacatcggagcgaaatgttatgaccattcgaatttgccgagagcttccgttattcaatttcgagcgtctagatgagttatgtcaccgaatcagacatctgagtgaaatgttatgaccattcgaatgtgtcgagagcttccgttgttcaatttcgagcgtctagatgagttatgtcaccgaatcggacatccgtgtaaaaagttatgaccattcggctttgtcgagagcttccgatgttcaatttccagcgtctcgatatatta

SEQ ID NO: 15402 - DNA, 425 bp, Glycine max
  unsure at all n locations
agcttatcattatcaaacttggagaaagagttcttggggtcaagacatgagaagcaatcaagtataatgttacttccttcactaaagcggtgatccatctccacacatattttatcaatagcaacataaaaaatctctgcacggtaatgatgaagattagtgatagtcctcccttctgctcttgaacgaccccgaactggtatttcgtcatccatatttggtaccagaatacttttagcaacacaaaatccttggacatcggcaaaaaaattattccagccactctctctcattgtgcccaaccgagctntgacaacatcaactaattccatgacattcacaatattaagatcttttctttgcaatatatttgaaagctcgtttgtgataccaaacaactntaacattaacctcaaaataaaagc

SEQ ID NO: 15403 - DNA, 434 bp, Glycine max
  unsure at all n locations
agcttttaatctttatacattattcccgctctgataccacttgttggaccttgtggcctcaataatcttaagagggataggcttagaatacagaagaaacaacaacaatcaatttaacaatgttctttanacatgcaagacacaattgattgcaacaaaataaataagataagggaagagagaatgcaaacacagttntatattggttcggccacaacccgtgcctacgtccagtactcaagcaacccacttgagagttccactaacttgtaaattccttttacaagttctaaacacacaaggacaacccttcctttgtgtttagagattctntacaacaagagactcacagtctcttaaccaatctcattgaataagaagaatggaagaagaattctctcttcaagagaagaatattacaatgaagatcatgt

SEQ ID NO: 15404 - DNA, 384 bp, Glycine max
  unsure at all n locations
ttatcttatgtttctaacatctacaatagacctcctcaacctcagtagcaaaatcagccacaacagaataattatgacctttccagcaacaggtacaatcccgagtggaggaatcatcccaaccttaaatggttgaatccttaacaacagcaacaacaacaaccttattttaaaaatgatgttggcctaagcagaccatacgttcctccaccaatctagcagcaacaacaacaacagcttcagaaacaacaaacagttgaggctccttcgcaccttcccttgaagaacttgngacgcacatgactatgcaaaacatgcagtttcaacaagagaccagagcctacattcagagctttactaatcagatgggacaattggctacac

SEQ ID NO: 15405 - DNA, 432 bp, Glycine max
  unsure at all n locations
agctttgagtttattcaaacgacaataactttttactcggatgtctaatcgagtccagtaatatatcgagacgctcgaaattgaatgttgaaactctgagctgattcaaacgacaataactttntactcggatgtccgattcagtgacgtaatatatcgagacgctcgaaattgaatgttgaacctctgagccaattcaaacgacaataactttttactcggatgtctgattgagtcccgaaatatatcgagacggtcgaaattgaatgttgaacctctgaggcaattcaaacgacaataactntttactcggatgtctgaatgagtcccgtaatatatcgagacgctcgaaattgaatgttgaagctatgagccaattcaaacgacaataactntntactcggatgtctgagtgagtaccgtattatattg

SEQ ID NO: 15406 - DNA, 337 bp, Glycine max
  unsure at all n locations
agcttctcgatatattatgctcctgaatcagacttccgtttcanaagttatgaccatatgaatttctccactgtattccgtgtcacaagtgatgaccatttgaatttctcgatagcattcgttgttcaatttcgagcgtctcgatatattatgcgcctgaatcggacttccgtgtgacaagttatgaccatttgaatttgtcgagagcatccgttgttagaattcgagcgtctcnatatattatgcgcctgaatcagacatccgtgtgacaagttatggccatatgaatntctcgagagcatatcgttgtcaatttcaagcgtctctatatagtctg

SEQ ID NO: 15407 - DNA, 485 bp, Glycine max
  unsure at all n locations
gctaataaatctatatatggttaaacacagcccttgtcagtggttccttttttttcatgggnataattctttatgtggttgtaatgataaccccatggatcaatgcatataccacaaggtcagtaggagtaaaatatgttgtcttgttttatatgtagatgatattttacttgtagtcaatgatcggggtttgctacatgaggtgaaacaatttctctctaagaattttgacatgaaggatatangtgatgcatcttatgtcatcgacattaagattcatagagatagatctcgaggtattttgggtctatcacaagacacctatattaacaaaattctagagagatatcatatgaaagattgttcaccaagtgttgctatcattgtgaagggtgataggtttagtttgaactaatgatcaaagaatgactctgagagggacgagatgaaacatattcattatgcttcaattgtcgacagcctca

SEQ ID NO: 15408 - DNA, 484 bp, Glycine max
  unsure at all n locations
cgcttctacaatctnccctttntggatgatgacaaccctgatatcaagatacacatacacattttnttcctagtcgatcactcacttaattctccatattctccccctttgtttttgagtttaagcttcacttgaaattaagttatttaattatgtgagttcttgatttaattcctattntctttccccctttggcagcaacaaaaagccaaagttcgtaacaattataaaacatacataaatgactaatcatacacaagacatttattgaataatctaaaccaatcatgaagcaaaaacatgaataacccatattaatatataaaccacatagtcatataacataattcataaaaacttagtcatactaagcaaatagtataagaagtactagatgttcanatttcataataatataggccaatacatgactagaaatctacagtctaataatattacacataatagacatctatgatgatgg

SEQ ID NO: 15409 - DNA, 332 bp, Glycine max
agcttctagatgagttatgtctgctaatcggacatcctcgtgaaagttatgaccatttgaatctctcgagtgcttccgttgtttaatttcaagcgtctcgatattttatgtcctcaaatcagacatcggagcgaaatgttatgaccattcgaatttgtcgagagcttccgtttttcaatttcgagcgtctagatgagttatgtcaccgaatcagacatctgagtgaaatggtatgaccattcgaatttgtcgagagctatcgttgttcaatgtcgagcgtctagatgagttaggtcatcgaatcggacatccgtgtagaaaagttatgacca

SEQ ID NO: 15410 - DNA, 378 bp, Glycine max
  unsure at all n locations
caaagcttgcattggtaatttttttctcatccatcaagatttagtacttcgagttatccaccatatagccaagccaacgttgagactatgttatttgtcaagttccagataccagtgaggtttacattgacaagtccagcctcacaattctccaaaagggggagaagaccaacatcagttatgcatagagtccaatcagattaatatgctgaagttggagacacaatttgaacaatcatggctaggctagcactaccaaaaccagngcacttttgaatgactaaagattgaaagactcgcaagaaaagtataacacttcatatcatatctttgactccatgtacttacaagggaaaagatttcacttcatttgatgtt

SEQ ID NO: 15411 - DNA, 391 bp, Glycine max
  unsure at all n locations
agctttgtctgatgagtactggctaatggcaatgcatgaagagctaaaccagtttaagagaaatggagtgtgggacttagtttctaaaccacctctataagtcaattaaacaaagggtgtttgaaacaacttgataattcacccatgtacggatacgaaatattgttgaagatgattcaaccgagaataaggaatcaactatgatgaaacatgcgctccaagtgcaaggttagatgctataagaatgctacttgcatttgcatgtattatggatttcaaactttttcagatggatgtaaaaagtgccttcctcaatggacgcgttgaagaagatatgtatgtagatcaaccactanggtttttggactatgaacatcctaaccatgtctac

SEQ ID NO: 15412 - DNA, 449 bp, Glycine max
  unsure at all n locations
agcttgncatatcttgntttatcctactaatcattggttagaaaaaggtgcaacagttactaaggaggataagttacaaagtgaactgatcagtcgtgatgctcattgtggaaccattgatcctaagtatgatgtaaaggatggattaatatttagaanacagtaaattgatgattcctgaaaattcagctctgagaaacaagaatttacaagaatttcatgacactataatagggggccatgcttgaagaacaaaaaccatggctagaatttgtagtcaattttattggcctaaactgcaagaagatattaagtcctatatcaaatgttgcagtatctatcaacacgctaaggtggatcaagcagtacctgcatgattgctgcagcattacccattccacaacatatctgagaggacattgctatggacttcatcactantctaccat

SEQ ID NO: 15413 - DNA, 484 bp, Glycine max
  unsure at all n locations
tactcagcttanacttgcacanaggagttgagcaggtaacanagaatcgtcttcattctcttagaggtgactntgagcgttcgtttatggaggagtccgagtcaatttctgattattgttctcgagtattggccgtagtcaatcaacttaaaagaaatggtgaagatgttgatgaggtgaaagtcatggaaaaaatacttcgaactttaaatccaagttttgacttcattgttaccaacattgaagaaaacaaggatttaaagaccatgactattgagcaactaatgggttccttacaagcatacgaagaataacaaacgagacaaattaaacaataggaggctacggagcaactactacaactcaacgtataggaagcaaactatgcaaattacaagagccaaacaggacgatgtcgctgccaatatcgtggacgtggacgaggacatggatgagaatgaagatgtggttacaacaaccactc

SEQ ID NO: 15414 - DNA, 417 bp, Glycine max
agcttccattgctcattttctagcatctcgatatattatgcgccttaataggacctccaagtgaaaatttatgaccatttgaattgctcaagagcttccattgttcaatttcgagcgtctcgatatattatgcacctgaatcgtacctccgagttaaaggttaagaccatctgaatatcttaagagcttccattgttcaatttcgagcgtcttgatatataatacgcctcaatcagacctccgagttaaaagttatgaccatttgaatttctagagagcttctgtgtgtcaatttcgagcgtctcgatatattatgtgcctgaatcggacatccgagtgaatagttatgaccatttgaattgctcaagagcttccgttgttcaatttcagcgtctcgatatattatgcgcctcaatc

SEQ ID NO: 15415 - DNA, 467 bp, Glycine max
  unsure at all n locations
agcttcaacattatactcacttccagggtgctggaactacttcacatggacttgatggggcctatgcaagttgaaagccttggaggaaagaggtatgcctatggtgttgtggatgatttctccagatctacctgngtcaactttatcagagaaaaatcagacacctttgaagtattcaaggagttgagtctaagacttcaaagagaaaaagactgtgtcatcaagagaatcangagtgaccatggcagagagtttgaaaacagcaggtctactgaattctgcacatctgaaggcatcactcatgagttctctgcaaccattacaccacaacagaatggcatagttgagaggaaaaacaggactttgcaagaggctgctacggtcatgcttcatgccaaagaacttncctataatctntgcgctgaagccatgaacacagcatgctacaatcacaacagagtcacact

SEQ ID NO: 15416 - DNA, 414 bp, Glycine max
  unsure at all n locations
ntaacanagtatccagtntgagtggtttggtcataatatcaaccacttgttcttgtgtcccacaatgcatcatcttgatagctccagtctttgtaagatctcgaacgaaatgaaatcggacatcaatatgtttataacgaccatgctttactggattcttcgaaagcttaatagcagagctactatcacaacaaattacagtagcctggttctgcattttacacaattttcccaacacccttttcaaccatatggcttgacaagcacacgatgctgcacctatgaactctgcctctgtagttgatagactcacaattggttgtttctttgatgaccaagagacagcagctgaacacaataagagaacataacccgaagtactttgtctatcatccaaatctcttgcataatcac

SEQ ID NO: 15417 - DNA, 453 bp, Glycine max
  unsure at all n locations
tcatctatctntccacacacacacattccctcaattatttccttgtatgttgtgacatcaggaagacagccactgctaatcatatgccctataagtttaaaacactcctccattctatcatgttgggcaagagccacaattataattgcataagtcttggcagtgggagaagatatagatgaaccttttgttctcatgaactcaaaaagatctacagcctctggtaccatacctgctttgcagtatgtatcaatggcagtgttgtacgcataattgtcatgcctatgacccagttcaaccatttcttccagtaatgtcatccctctagtcnggtgtctaaccctacaccacccataaacgaatatattatacgtctccgcattaggcttgactggtttactcattatcttatacagaagttcagcatcctcaaccaagcaacacttgcacagt

SEQ ID NO: 15418 - DNA, 412 bp, Glycine max
  unsure at all n locations
agctntgaatgctctattctatggagttgacaagaatatctgtagactgatcaacatatgcacagtggccaaggatgcatgggagatcctgaaaaccactcatgaaggaacctccaaagtgaagatgtccagattgcaactattggccacaaaattcgaaaatctgaagatgaaggaggaagagtgtattcatgacttccacatgaacattcttgatattgccaatgcttgcactgccttgggagaaagaatgacagatganaagctggtgagaaagatcctcagatctttgcctaagagacttgacatgatagtcactacaatagatgaggcccaagacatttgcaacatgagagtagaatgaactcattggtcccttcaaacctttgagctangactctcggataggact

SEQ ID NO: 15419 - DNA, 481 bp, Glycine max
  unsure at all n locations
tttgcaagctggaatcatttatcatacctctgatagccaatgggtgagttccgaagaanactggcctcccgtgataaanaatgagaaggaggagttgattcctacttgngtgcagaacagttggagagtctgcatcgactataggaggctgaaccaggttaccaaaaaggaccattntccactgcattcattgatcagatgcttgaacgcctggtaggtaaatctcactactgtttccttgatggttnttctggttatatgcaaatcactattgctcctgaggatcaggagaagaccgcattcacctgccccttcggcacttttgcctataagaggatgcctttcggtctgtgcaatgcccctggtaccttccagcggtgcatgatgtagtagtttagtgatattttagaaaattgcatagaggtgtttatggatgatttcactgtatatgaatnctcttttcatatttgtttggatagtc

SEQ ID NO: 15420 - DNA, 462 bp, Glycine max
  unsure at all n locations
agcttctaaactttgtacaagaatgaagctctgataccacttgttagacangtggcctcagatatcttaagaaggggggggttgaattaagatattcgaaactttttcccctaattaaaaatctatcttactttntacttaagttatgaattcccttaatgacaatcttcttaaatattaattcaaatgaagcaacttgaatatgaatataaagcaataataaataaaggagattaagggaagagaaaatgcaaactcagttttatactggttcggccacacccttgtgcctacgtccagtccccaagcaacccgcttgagagttccactaacttgtnaattccttttacaagttctaaacacacaaggactaccctatctttgtgtttagagattctttacaacaagagactcacagtctcttaatcccttanagaatgagaagaagaagaggaacaaatc

SEQ ID NO: 15421 - DNA, 437 bp, Glycine max
  unsure at all n locations
gagatgaannaaattatactagatcaaatganattgattattttttataataaacatcaacacatatatctcaagaaagatatattatataacatcttatcagacacaatctctataacttggaagagaattccataaacccatagaaccatcacatatagacctctaanaaaaacaaaaatcaagactaaaaaatttcaagatagatgtanaactaatttttattntcatatgactatttgatacatgtaaattaaaatgtcattatatattaataatcaagacagtaatttaattacaataattagtacattntatggaaataaatattcaaaatgaanacaatatatntacaagtgttcaaatcgattggaatattntttcttttctaccgcctaatcntaattccgaatatttaattgatttgaatatttata

SEQ ID NO: 15422 - DNA, 398 bp, Glycine max
agcttataatatatttatacgctcgaaattaaacatcggaaactctcggaaaattcaaatagtcataactattcacacggatgtccgattcaggcttataatatatcgatacgctcgaaattaaacatcggaaactctcgcgaaattcaaatggtcataacttttcacacggatatccgattcgggcacataatatgtcgagaagctcgatattgaacaacgaaagttctttagaaattcaaatggtcttaacttttcacacggatgtccgattcaggagaatcacatatcgagacgctcaaattgagcaacagaagctcttgagaaattcaaatggtcataacttttcacacggatgttagattaaggagcatcacatattgatacgctcgaaaatg

SEQ ID NO: 15423 - DNA, 347 bp, Glycine max
ttcgtcttcttgtttagtccagtcttcttctggctttctttcatcagtgggctttccttctgtgtgcagcatcttgggatgtacccagcctttgatgacagctttccaggttctgctatccagggatttgaggaacggcaccattcttgctttccagtattcatagttggttccatccaaaattggaggtctgttcactggtcctccttctttctccatcgtcatcagaatgcatctccctagatctcactctgtgatttcgagtgttggctctgataccaattgaaattctgataccaggggacagatgtcgtaccggatgtcacgacatcacgcttcagaacatg

SEQ ID NO: 15424 - DNA, 401 bp, Glycine max
  unsure at all n locations
agctntgagcaaatcgaaatgacaataactttatacacggatgtccggttgagtcccgtaagatatcgagacgctcaaaatttagatccgaagctctgagaaaattgaattgacaataactttatacacggatgtccggttgagtcctgtaatatatcgagacgctgcaaaatgaaaacggaagctcgtaggaaattcaaacgacaataactttttacttggatgtccgactgaatcgggtaatatatcgagacgctcaaaattgagactagaagctctgagcaaattgaaatgacaataactntatacacggatgtccggatgagtcccgtaatatatcgagacgctcaaaatntagatccgacgctctgagagaattgaatcgcaataactntatacac

SEQ ID NO: 15425 - DNA, 482 bp, Glycine max
  unsure at all n locations
tttcgaccatctcgatatattaccagactcatccggacttccgtatataaacttattgtcaattaaattgtctcagagctttggatcaaaattntgagcgtctcgatatattacgggattcattcagacatccgagtaaaaaattattgtcgttagaatttgatacgagcttccgttttcaatttggagcatctctcgctaaattgcgataggctatcgggcatccgaganaaaagttattgtcgtttcatatttctaagagtttccgttttcaatttggagtgtctcaatatattacgggactcaaccggacatccgtgtataaagttattgtcatttcaatttgctcagagcttctagtctcaattntgagcgtctcaatatattatcccgattcaatcggacatgcgagtaanaagttattgtcgtttgaatttcctacgagcttccgttntcaatttggagcgtctcgatatattaca

SEQ ID NO: 15426 - DNA, 404 bp, Glycine max
  unsure at all n locations
agcttggaaggtattcataccacacaaaatatatatatgtatgtttaggtagaaagataccttagatatgcatgtatgtaaacaaaaacacacttcacaaaatatatatatatgtatgtttaggtagcaagataccttagatatgcatgtatgtagcaaaaagatacctcacaaaatatatatatatatgtatggtagcaagataccttggatatgcatgtatgtagcaaaaagatacctcacaaaatatatatatgtatgtttaggtagcaagataccttggatatgcatgtatatagcaaaaatacctcacaaaaatatacacatgtttaggtagcanaatacctcatgaaaaaaaaaaaaaaccaacaagattaagaaataaacaaatgataatgataaaa

SEQ ID NO: 15427 - DNA, 440 bp, Glycine max
  unsure at all n locations
agcttggaatatattatntgaattctagtcccccttatagactctgtgaagatgtttgctagttggtcattagaactatcaaattntgtaatgagttctttggaaaaaaccttttcctgaatgaaatgacaagtaaatttaatatgcatagttcatccatgaaacatcatattggtggctatatgaagagctttgcttgattgtcacaacataatttcacctattggatgtctctaaacttcaattcttgaaggagatatttaatccaaacgtgtgcacaagtagctgtacacatatccttatactctacttctgcacggtgcagtaacattttgctttttactcttncaagagacaatattccctccaataggtacacaataccccanaatacagcatttgtcaataggcgagcttgcccaacctatatcacaatatcc

SEQ ID NO: 15428 - DNA, 325 bp, Glycine max
taagacagccagtaaccaatagaaaagatcaagcctgtcctggttaatgtcgttgttgtgaagccagccagcagctgaagaagaagaagttgaagtgatcttattgaccaaagaaaccaaaagtgtgctcaagtaaaagccaaatgagtaagagcaatatgtgatggctgtaaagaatgcttgcatccctttcaaggactgtttataaaagaactcaaggaggccaatggctgtgaacatctctgacaagccaaatatcaagtattgtggggttatccaaaagatggacaaaactttgtgatggttcacagctgcgtcccttctc

SEQ ID NO: 15429 - DNA, 371 bp, Glycine max
  unsure at all n locations
tctatagaaggttcgttcctaatttctctacaatggcatcacctctcattgagctagtgaagaagaatgtggcatttacctgcggtgaaaaacaagagcaagcatctgctttgctcanagaaaagcttactaaggcacctgttctagctcttcctgacttttctaaaacttttgagctagaatgtgatgcctctggagtgggagttggagctgttttgttgcaaggtgggcaccctattgcttattttagtgaacaacttcatggtgccacccttaactaccccacctatgataaagagctctatgccttaataagagcactccgaactcgcgaacattaccttgtttccaaggaattagccattcatagt

SEQ ID NO: 15430 - DNA, 437 bp, Glycine max
agcttaagaattattttctatcaactacttgtttccgagggaaattctataaataaacctcccatctttaatggagtgggtaccactactggaaaacccgcatgcaaatctttatagaggcaatagatttaaatatttgggaagccatagaacaaggaccttatgttccctctataatggccggaagtgcaacaatatgaaaacctatagcagattggactgaggaagaaagaagattagtacaatataatttacaggccaataatattattacatctgccctatgaatagatgaatactttagggtttctaattgtaaaagtgctaaagatatgtgggatacactacaagtaacacatgaatgcacaacagatgttaacagatctatgataaacactctaactcgcgaatatgaactctttacgatgaaataaatg

SEQ ID NO: 15431 - DNA, 434 bp, Glycine max
  unsure at all n locations
ngctctataaattctttctcacttgatacactccatggatgaacagcagggacttttgccgaataaagagtggtggaatttgcaggaggattatgcttgtagatcattgtatcaagaacggggtcaaaattctgaggagaatctatggagacacagaacataggaattgcaaccttctgatggatttctacgtcgcccacaaggttaacaagctcaacaaaatcactgataaggcgctgaggaacatagaacacctcagaactgcatattatgagggttttatcggtgtcgcttgtttctttgtaactgactcgaaagtgcgctggcatcgtgctaacaaccttctgtaccattcttgcttgttgtgaaacccatctgagtcctcaccatttgtaatatagaagaccgagactcngatacctgaatcccagtaa

SEQ ID NO: 15432 - DNA, 423 bp, Glycine max
  unsure at all n locations
agctgtgtaatgaagtatacaggctatgtttatttagtggcattgtttataactcgtccaagagttcttcctctttaattacctgttatatattcttttgattctatattttcaagcatggaattaaattgtatatacaggatcaatttgacactatgcgtaaaactttaacacttgcatcacttaataatttacacgaaattaactaattccaccattgattaagtttaaacaattccatacaaaacaaaaactaattgatacttaatcaatatgctntattttgatagataatatattatgtcttttatgtgaaataagtaaaatatttagttagatgaaatttcaggaatatgtttaatttatgtgatatttgatatacatgatagagaaagtaaatattatattaattcgcttaatctt

SEQ ID NO: 15433 - DNA, 432 bp, Glycine max
  unsure at all n locations
gatattcaagatggatgatcaagatagtctgtatagtcttagaaagggtatattaaataggaagggaattccaattgaagtagcaaaaggtttggccaagaaaattaagttaaaaagtcttttacaagaaatttactctctggtaatcgattaccagaggatgtaatcgattaccagtggccaaaactgatttacaacagctattaaaatttgaattcaaaatttgccctgtgtaatcgattacacatatatggtaatcgattaccagcagtttctgaaccgtttaattcaaattntacagcttgtaatcgattacacatatactgtaatcgattaccagatcagattntcagaaaatattctcaatagtcacatctttgtatgtggttcttgaatggctatcanaggcctatatatatgtgacttgagaca

SEQ ID NO: 15434 - DNA, 454 bp, Glycine max
  unsure at all n locations
agcttgcttctacaatctccccattntgatgatgtcaacttctgaaatcaagaaacacacacacacacacacacacacacacactttttcctagtcgatcacacacttctacaatctccccattntgatgatgtcaagaaacgcattcatacaacattcatggaaaaatataaaccaaatcatgaagcaagaaccatgaatataaaaaccacatagtcaaataacataattaatatttgttcaaacatatcatgcaaataaagaaatagtaaattgttcaaatgtcataataatatagattatntggataagtcactaacatctatcagtcctaattctcttctaatggtgtaaaaggtatctttacttagtggttntttaaaatgtctgcaagttgaattttagtatctacaaattctaaaacaacatcaccttntagaacatgatgtctaat

SEQ ID NO: 15435 - DNA, 457 bp, Glycine max
  unsure at all n locations
agctnttaactgtatttgcagcgttccaattgttntttaaatggtgtaatcgattacaatatattggtaatcgattactagagtatctaaatgttgaaattcaaattcaattgtgaagagtcacatcttttcataaaatgctttgtgtaatcgattacatggttttggtaatcgattaccagtgacaagttttgaataaaaatcaaaagatgtaactcttccaatggttttctcaagattttctcaaggttataactcttccaatgttttcttgaccagacatgaagagtctataaaagcaagaccttgacttgcattntaagtacttgatataacttttcatatatacttttacaacctttgaatctctntgaaccatcatttgaacttcttcttcttcttcttcctttgtcanaagctntctgagttntctgatttccaaaccttgttatttcac

SEQ ID NO: 15436 - DNA, 440 bp, Glycine max
  unsure at all n locations
acgctttaagtggaagaatattctccgtattcctacgtgatattggcttcatcgtgagatgtttcaataaactcatagttttgtctgctactcttctcaatcaaatgaaatagttaagtttgttcgcttaaaaaaaactcatacttttgtcttattattaattttcgtattagaagttgatataaaagtatgttggaaaataaaataaaatatttaaatttgcaatgatagatagtttttaacgatcaaattataattatatttaattaattatttggtctttataattctataatttatacattctagtttctatagttcgaaattaatctttctaagttttataatttatatcttaattctctggttagttttatagtctaaaattgatttatctagttcttggaattcatattctaattctnttttagctcttatga

SEQ ID NO: 15437 - DNA, 463 bp, Glycine max
  unsure at all n locations
agcttgcttatgtctttacctattcctaagcatgtatggcaacacatcaccatggacttcattgaaggtcttcctttctcttttggtaaacaagtcatttatatagtagtagataggcttagtaaggcaactcatttcatggccttatcacatccttatactgttgcggatgtggcccaatgcttccttgataatgtctttaaattgcatgggtttcctgacaccattaccagtgatagggatcctgtttttgttagtcacttttggaaggaatntatgtcctttcaagggattcaggtatagctttctatagcttatcacccacaaactgatggtcaatcagaagtggtgaataggtgccttgaaacatatctcaggtgcatgtgtagtgactcttcaacacagtggtcccaaatggtgcctcttgcggaatggtggacaattccacttaccacacattatt

SEQ ID NO: 15438 - DNA, 390 bp, Glycine max
  unsure at all n locations
ntccctctntgaacanatacccctcagccaaatagcattcatcttgtgcctttntcccacaactctcgtaaatgggagaaaaatgttcatctaaagcatacaagtccctaatattatcaattcctaaaatttaagctcctagggagcaaaacaatgtgtgtctcctagagagggcatcagctaccacatttgtttttccctttntgtatttgataacatatggaaatttctctaggtactctacccattntgcatgcctcttgtttaacttgctttgccctctaatgtacttaagtgattgatgatcactatgaatgacaaattccttggaaacaaggtaatattcccaagtttggagggctcttattaaggcataaagctctttatcat

SEQ ID NO: 15439 - DNA, 463 bp, Glycine max
  unsure at all n locations
agctntgcagcccaatcctttctttaagtaggtacggtgttttctagtatcctcttgatctccctagtctaaactccaacttttccatttgtttacggatgataaggtgatgctactttgtgtcaaacatcatagtgttgaaagacctttgagaattgagcaatacaaaagtgtgtaccttcatcactaatcaagagtctaggcaatcaaaacctaacaaaaatgtttctctttaagatattaatcatcatctttacatcattggttggactagaaatttcttccacccactttaagacatagtccactactaccaagatatatctgttgccacgtgaggatggtaaggggaccaaaaaatcaattccctaacaatcaaacacttctacctcctgcatgttctgtaatggcatttcatgtcgtctagatatgttgccgattcgttgaccaatattgcatgatc

SEQ ID NO: 15440 - DNA, 491 bp, Glycine max
  unsure at all n locations
tcctctgaggcaactccggtataaactggataaaccctntcttcaacacacctaatggaaccgtgcacaatgccatatcaccctcaaacacctgactccctgcagtcacctgcactccatcgccactatacctaatcatatgcacagtcttctcatacaaaatcggcacattctctgacaaagcctgaaccagcttcccatttcccccaggcaaaaagcaatggtctccccccatatcatatggatcatcctggtcccaaaacgcaagcgaaagatttgacaacaaccccgcattcgcatactccaaatttgcgagatgccaattaaacaaattcatttcctcatcactcactgcgtccttataaacctgactgaatgtctncagcgcagccncgagcgacacantccaccgaaacctccncatcagctgcctcagcctactcgccttatcaagcaaccgattaaacgcagactccaccttcacatccata

SEQ ID NO: 15441 - DNA, 426 bp, Glycine max
agcttctacattcaatttcgagcttttcgatatattacgggactcaatcggacatccgagtaaaaagttattgtagtttgaatttgctcagggcttcggtattccatttcgagcgtctcgatatattacgggactcaatcggacatcagagtaaaaagttattgttgtttgaatttgctcagagcttcggtattccatttcgagcatctcgatatattacgggactcaatcagacatccgagtaaaaagttattgtagtttcaatttgctcagggcttcggtattccatttcgagcgtctcgatgtattacgggactcaatcagacatccgagtaaaaagttattgtcgtttgaatttgctcagagcttctacattcaatttcgagcttttcgatatattacgggactcaatcagacattcgagta

SEQ ID NO: 15442 - DNA, 480 bp, Glycine max
  unsure at all n locations
ntgagcanattcaaacgacaataactntntactcggatgtctgattgagtcccgtaatatatcgagacgctcgaaatggaataccgaagctctgagcaaattcaaacgacaataactntntactcggatgtctgattgagtcccgtaatatatcgagacgctcgaaattgaataccgaagctctgagcaaattcaaacgacaataaacttttactcggatgtctgattgagtcccgtaatatatcgagacgctcgaaattgaataccgaagcgctgagcaaattcaaacgacaataactttttactcggatgtctgattgagtcccgtaatatatcgaaacgctcgaaattgaatgttgaagctctgagcaaattcaaacgacaataactntntactcggatgtctgattgagtcccgtaatatatcgagatgctcgaaatggaataccgaagctctgagcaaattcaaacgacaataac

SEQ ID NO: 15443 - DNA, 320 bp, Glycine max
  unsure at all n locations
cggttatctccttcttcactacatcaagaatcaccgggttgtgtcttctctgtggctatcttactggtttagctccatcctctaaatttattcgatgcatacatttggatgggctaatgccaggaatgtccaccagggtccagcctatagccttcttatgattcttgagaatagacaacaacttctcctcttgctcatcagcaagggaggcaaatataatcactggaaaagttctgctatcatccacataagcgtattttaaatntgatggcagaggcttcaattctggtgtggcccgctggatagtggtagaaagagat

SEQ ID NO: 15444 - DNA, 477 bp, Glycine max
  unsure at all n locations
ntagattctanaatgaatcanatcattattgttctaacttttatttgtgaaatgttgtcaaaatgttaaacaactaagaagcaaattaaagcagacctcacattttcaaaaaaaagattcgaaagaattgaaagttttgaagaggcaatatgcggcactaccaaaacaagaaaaatgtagcatttaccagcagtaattcttattagctnttgtttatttgatttgggtaatatagatagctaccaagataagcagaattttattacaaaagatttatctattgaagttctatttatttttctttacataattatgcatcatctttcttgtttttcgtactttagaatttcataccgtatagcagtatttttatgagaaaacatattaacatctgaattgttaaacattaaaaacatgtacacatgtatgaactntntgcgtgaaagtattttgatatttgaattgctaagatatata

SEQ ID NO: 15445 - DNA, 424 bp, Glycine max
agctttagccttaggttgtttcatgttgctgctccccttatctttaacagtaacaagcacatttccattcacaggtttagcgacatcaacatcatcacttgagccctcactttcaatgtttccattatccagtaatatcatgcctcttttatttggacattgagaagcaatatgaccaactccttgatacctgaaacatttgatatcatgggatctagaagatgaattaatttccattttacctttaggtgcagcacatgaatttttggacttagcttcatcttttgactttgtcatagaatttctgttttgccaatttgacttccatgaataagtggaatcaaatttggaagtactcttagctatcaattgcctctccacttgaatagatttatgcagcaagtcctctatctccacataatga

SEQ ID NO: 15446 - DNA, 460 bp, Glycine max
  unsure at all n locations
tcacctgcaactccaacccgctttatatcctaacaacaggttatctttatgtttaactntaatgtttgtccgacccataaaatatgaattatgtacaacaaaaatgttaagaatcttttatagtgttcaccattgaaaatgctcttaaaagtgaacatatttagcatatataattatgttaccaaaatataaattttttacaaattaaaggtttactcataattctttaagacaattgtgggaagggttttgtcatgcttttctcccttgcaaatccaatacatataagatctctttcgatataaagtagaagtgtttttgagagtttttttaataaaataatttatatttataatagagaaactttcaaaagcatgtatgaattgtatccaaacaaattcctaatgggttctagagtgcacaaggttgtaatgtcaagcacggtacacaagttttctta

SEQ ID NO: 15447 - DNA, 461 bp, Glycine max
  unsure at all n locations
tcgattacacaagtcttgtaatcgattaccagaggagattntcagaaaataatttccaagagtcacatctattcaaatggtttatgaatggccatcaaaggtgacttggaaacacgaatttaaagagagttttcattgcccaaaaagttttatcctctcaaaagattaagagtttttctgaactgaaatgtcttatcctctcaaaaagattccttggtcaaccacttgcatattcaataaggaattttgattgatcttcattgtacaatctatcttttttaagagagatttcttcttctcttcttcttacttctgaaaagggattaagagactgagagtctcttattgtagaggattcttgaacacaagggaagggttgtccctgtcgtggtcagactttgtaaaagntgttttacaaagagagtggancatctcaagtgggtttcttgaggactggacgt

SEQ ID NO: 15448 - DNA, 401 bp, Glycine max
agctatgtgttcgatggttctataacatctatcccccacatggaaaaaggccaaggtgcagacataacattcagaggatgtggcggaacattgacattgtccgcgtatgcttgacatttatgacatttgcttacatgggcacaacaatcgctttccatagtgagccagtaataaccggctctaaggatcttcctggccatagcatgcccattggcatgtgtaccaaatgaacccccgtggattacctcaatcatgtagttcacctttttggcatctacgcattgtacgacggtcatgtcggggttccgtttgtaaacgatggtaccactcacatagaccgcctggttcttacgtaataacttgaaaatgggctcacatgtaggggtgagtagtgagataaa

SEQ ID NO: 15449 - DNA, 377 bp, Glycine max
  unsure at all n locations
agcttgtaataagctttaaatgccttcatgtcatctgtaacctttacaagttcaacagttggcttctccctcacaataggcaagaaagcaccctggacttgtgttgcatttgcaagctcctcgggagtagaatcaccagcctacaataaaacaacagtttcacatgacacacaaacatctttcatttcgaccttcatcagaaatgaaaatgcctaccacaatcaaaatagataatggaacatctgaattaccttaaccttgtgtgcccgtcttgggaacacaaccaatttggccttgtatgttttcagcctctgcacattagctggcagactntccaaagaacggttcttgcgacgatgatcaacagcaatacctat

SEQ ID NO: 15450 - DNA, 429 bp, Glycine max
  unsure at all n locations
tctaaactntatacaagaatgaagctctgataccacttgttatacaagtggtctcagatatcttaagaaggggggttgaattaagatattacaaactatttccccaattaaaattctatttcactttctattcaagttacaaattcccttaacaatgaacttcttaaatattgattcaaatagatcaatctgaatataaatataaaacaataataaataaaagagtttaagggaagagaaagtgcaaactcggatttatactggttcggccacacccttgtgcctacgtccagtccccaagcaacccgcttgagagttccactatcttgtaaaatccttttacaagttctgaacacacaagaacaatccttcctttgtgttcagaattcttttacaacaagagaccctcggtctcttaatcccttagag

SEQ ID NO: 15451 - DNA, 449 bp, Glycine max
  unsure at all n locations
tattaaactcaatannaaaggcaacgtataattcatgcggtaaatactttttttcttttgtaccaaaagcaaacaaaagtaataatttgatataatgaaatagtacattgcctaatgatgtctcgaccatctgagaggattgttccacagactgcaagaacctcaaaactcgcttccaatttcctccacatctatcatacagctccctctgagaattcaaacccatccttgcaaaggtaacatgggaggcacacaattgaaatgcagcaaagtcaaccaaggacttgaacttgaaagggtgcaaaccatgactaccaccaaaagttttggaagtcaattctaaacanacaaggtccattgcactgagcctgcccgagcacagaatttctaataccaaatgtgatggcaattcctcaatggaaaaatggtctgcaacggtctccatcctc

SEQ ID NO: 15452 - DNA, 452 bp, Glycine max
gtacatatattaaaggcattcgctggttaatcctgctatagtactctcgcaatgcgattcacagtttcaggaacatattcaagtacaagattcaagtaaacttcttctttgtcagtcgttgaaaagaaacaatgccttagggcaacaatatttggatgatccagcatttgcataatttgtaactctctattcttgtatcgcttgtcctggagaactttcttgatggccacaatttctcctgtttctctacattttgcctaataaaagcattgataaaacgaagaaggtatcatcagtatgtcatacatcaacagcatggtgtttagaagagatatgaaaagcaaactcacctgaaaaacaacaccaaaagagcctgtccccactacatgctctgcaatataactaacattctgtcaactcacaaataaaaattatgtcagaggaagtattag

SEQ ID NO: 15453 - DNA, 419 bp, Glycine max
  unsure at all n locations
agctntcttcatttgtcgatatggatgataatgtttgagaaatcttcggtgccttgtgtatactatcttctttccatgttttagttggaagaagctcatatttttctcacatataggacatgtatgatggcctttgacactataaccacttaaatttccatatgttggatagtcattaagggtgcaaaaaaccattgcacgcaacctaaaggtctgctgcagattcccatgccacacatctaccccatcttcccacaattntgtcaagtcttcgatcaacgaaatcaaatagacctcaatatcattccctggctgtcttggagccactatcatcatgcanagcattatgtacttttgcttcatgcacaatcaaggagggaagttgtaaatcattagcanaacagactatgaactgtgat

SEQ ID NO: 15454 - DNA, 474 bp, Glycine max
atctacatagagtagaagatagatcattgatccatcctccaccttgttgcgataacacaacaatcatagagacttctctagaatccttggctggtgataaagctatcaaacctcatgtaccattgccttggagattgtttcaaaccatacaaggacctttgcagctgacaaacatacctttcttttacttgaacttcaaacccttcaggctgtttcattagaatattttcttccaatcttccatggagaaaagcagtcttgacatcaagttgttcaagttccagatcttggtttgccactatagcaagcagaaccctgatggatgtatgcctaaccataagagataaaatttcgttgaaatctattccttctttctagctgaatcccttggcaactaacctagccttgtatcttatcccttccttttctaaaagaccacgtttcctcttgaatatccacttgcaacctaccaca

SEQ ID NO: 15455 - DNA, 417 bp, Glycine max
  unsure at all n locations
agcttgacatgctgccattttatcaacaatatattctgcttcacatgttgacaaagcaactacactctgattcattgagcaccaagagattagtgatgttccagaattgaaaacatacccagcagtgcttttcctatcatccttatcaccacaccaatctgaatcactataaccaaacacttctccttttatattcttctgactgtaaggatataaaatgccaagatccaatgttcctttcacatacctcagaatcctctntgctgccaagaagtgaggtgcctttggtttctccataaacctacttatcaacccaacacaatatgcaatatcaggtctagtgttacatacgtatctcaatgagcctacaatttgcttgtacaaggtaggatcaacttctttctcatccccatctat

SEQ ID NO: 15456 - DNA, 446 bp, Glycine max
  unsure at all n locations
ntgatgcaacatttggagaggttaatgaaacaacgagatgatgcgctccatgagatgttggatcttatggagaatagagatcataatgaagaagaaaggaggagaagagggaatgatggtgttcctagacaaaaccgaattgatggtattaaactcaacattcctccatttaaaggaaagaatgatccggaggcctacttggagtgggagatgaaaatagagcatgttttctcatgcaacaactatgaggaggaccaaaaggtgaagcttgccgccacggagttttccgactatgctcttgtgtggtggaacaagctacaaaaggagagagcaagaaatgaagagccaatggttgatacatggacggagatganaaagatcatgaggaagcggtatgtgccggctagttactcaagggacttganattcaagcttcanaaactaac

SEQ ID NO: 15457 - DNA, 414 bp, Glycine max
  unsure at all n locations
agcttataatatatcgatacgctcaaaattaaacatcgaanactctcgagaaattcaaatggccgtaacttttcacacggatgtccgattcgggcgcataatatgtcgagaggctcgaaattgaacaacggaagctcttgagacattcaaatggtcataactcttcacacggatgtccgattcaggcaaatcacaaatcgagacgctcaaaattgaacaacggaagctcttgagaaattcaaatggtcataacatttaactcggatgtccaattcaggcgcatcacatatagtgacactcgaaattgaacaacggaagctctcgagacattaaaatggtcataacttttcacactgatgtccgattaaggcttataatatatcgattcgctcgaaaataaacatcggaagctct

SEQ ID NO: 15458 - DNA, 437 bp, Glycine max
  unsure at all n locations
tgaatcggacatccgtgtganaagttatgaccatttgaatttcacgagagcttncggtgctcaatttcgagtgtcactatatgtgatgcgccacaattggacattcgagttaaatgttatgaccatttgaatttctcaagagcttccgttgcacaattctgagcgtctcgttatgtgattcgtctgaatcggacatccgtgtganaagttatgaccatatagatttctcaagagcttccgatgttcaatttcgagcctctcgacatattatgcgcctgaatcggacatccgtgtgaagagctatgaccatcttgatttctccagagcttccgatgctcaatttcaagcctatagacatattatgcgcctgaatcggacatccgtgtgaaaagtatgacctttgaatatctccacaacttccatagtaatttcaacgt

SEQ ID NO: 15459 - DNA, 457 bp, Glycine max
  unsure at all n locations
tcgtgtccaaggatgacaaggtgcagtacatgcaaagagatattacattccgctaaaacttaaatagtgtatgggcaggatatccagaaatcatgcatattgcattgtacataaagtcacaaacaagggtactcaagcatgttaatatctgcaatgtccatcacattntaaacagatcaaggaataaagtcaagagggttacagcatccacagaggcttcagctgcgcctttgaaatagccaatagatccctcaataagtcttctatatccttgctctggagcaattagatgtggctgataaccatccgcttccataacaactttttcgacattctttaacgaaagatggcgattaaatgggagctctcttaatgcagctggtaattggtggtcaaaaacaccatatattctatccccgccaggacgtctaatatacaagttggtacttagtcaaat

SEQ ID NO: 15460 - DNA, 391 bp, Glycine max
  unsure at all n locations
tcatgtagtgtcagtcgtgtcaattaggaaaacatgttatgtcctcttttccaaatagaactgaaacaagatgtaattatgttctttacactattcactcttatatttggggtccaagccgagtcacatcttttggtttcaagtattttgttacctttattgatgaatactctagatgtacctgngtttatttaatgaaagatcaatatgaacatttacctatattcatgtctttctttaatgaaatcaagacccagtttggaaaagtaattaagattcttgcgagtgataatgccaaagaatatttctcctctaatctctctttggtttaaccacacaaggcattttacatcaggccacatgtcctcatacaccacaacaaanatagtat

SEQ ID NO: 15461 - DNA, 408 bp, Glycine max
  unsure at all n locations
agctttcatcaaattcaaacgacaataactttnttcctcagatgtctgattgagacccgtaatatatcgagacgatcgaaattgaattctgaagctctgagctaattcaaacgacaataatgatttgctcggatgtctgattgagtcccgtaatacatcgagacgctcgaaattgaatgttgaagctctcagcaaattcaaacgacaataactntttactcggatgtctgattgagtcccgtaaaatatcgagacgctcagaattgaatgttgaagctctcagcaaattcaaacgacaataacttttttcctcagatgtctgattgagactcgtaatatatcgagacgatcgaaattgaattctgaagctctgagctaattcaaacgacaataatgatttgctcggat

SEQ ID NO: 15462 - DNA, 340 bp, Glycine max
tcagaattcaatttcgagcgtctcaatagattacgggactctatcagacatccgagcaaaacgttattgtcgtttggattagttcacagcttcagaattcaatttcgatcgtctcgatatattacgggtctcaatcagacatctgaggaaaaaagttattgtcgttggaatttgctgagagctcaacattcaattttgagcgtctcgatgtattaccggacttaatccgacattcgagttaaaaggtattggtggttgaatttgctgagagcttcaacattcaatttcgagccgctcgatattttaccggactcaatcagacctccgagtaaaaagttat

SEQ ID NO: 15463 - DNA, 447 bp, Glycine max
  unsure at all n locations
ntgatgcaacatttggagaggttaatgaaacaacgagatgatgcgctccatgagaggttggatcaaatggagaatagagatcataatgaagaagaaaggaggagaagagggaatgatggtgttcctagacaaaaccaaattgatggtattaaactcaacattcctccctttaaaggaaagaatgatccggaggcctacttggagtgggagatgaaaatagagcatgttttctcatgcaacaactatgaggaggaccaaaaggtgaagcttgtcgccatggagttttccgacgatgctcttgtgtggtggaacaaactacaaaaggagagagcaaganataaagagccaatggttgatacatgggtagatatganaaggatcatgaggaagcggtatgtgccggctagttactcaagggatttgaaattcaagctccaaaaactaacc

SEQ ID NO: 15464 - DNA, 294 bp, Glycine max
agcttccatctctattcactcagaggtcagattcgggcacataatatgtcgagatgctcggaattgaaccactgaagctctcaagtaattcaaatggtcataactttacacacagatgtccgatcttggcgcatactatgtcgagtagctcgaaattgaacatcagaagctgtcgagaaattcaaatggacatagtatttcacacggatgtcatattcgggcacataacatgctgagatgctcgtaattgtaccacgaaagctctccagtaacttcaaatggtcataacttttt

SEQ ID NO: 15465 - DNA, 419 bp, Glycine max
tgaatcggacctcagtgtgaaatgttatgaccattttaatttcacgagagcttccgttgttcattttcgaacgtctctatatgtgatgcgccttaatctaacatccgtgtgaaaagttatgaccatttgaatttctcaagagcttacgttgttcaattatgagcctctcgacatattatgcgcccgaatcggacatccgtttaaaaagttaagaccatttgtatttctcgaaagctatcttggttcaattccgagcatctcgacatattatttgcccgattctgaccttcgtgtgaaaagttatgaccatttgaatttctcgagagcttccaatgtttaatttcgagcgactcgatatattataagcatgaatcggaccttagtgtgaaaagttatgaccatttgaatttgtcaagagc

SEQ ID NO: 15466 - DNA, 426 bp, Glycine max
  unsure at all n locations
agcttctgtccctgagaatctggttcccagaagacaacagggagtgaagattgctgaaaaccctagccttgcaacaagttctagggaagtagacacggagatggacaagaaaatccgcggtattgtgagtagcattttgaaagaagcttctgtgcctgatgctgagaaagatgttccaacatcttccaccccgaatgtttctgtgcctgatgttgagaaagatgttccaacatcttccggcccaaatgctgaagccctcccttcacccagtgaagaggaatcaacagaagaagaggatcaagcctcanaggagactcctgcaccacgggcaccagaacctgctccaggtgacctcattgacctggaagaagtagaatctgatgaagaacccattgccaacaggttggcacctggcattgcggaaag

SEQ ID NO: 15467 - DNA, 420 bp, Glycine max
  unsure at all n locations
tgtatctgttgcacganaaagcaagcagaaaaatacgaacctgtgtcagttataccgaagtatgcaagaagcatatgatcaaatgcagactccattagcccgccaaataccacctgccttggtaagtataatcctatgattcccaattgacttgaatttgtgatctctctctcctttatcctatatcttgttcttcaagcaggggctaaaggagctgaaggaatccaccatccaactggcttcaagtcatggatacattgattcccctgttgatgagactgttttcgatgtggataacgatgttgatgaccttctgccagttgaagttaaagaacagcgcctcagcaatctgctgcaggcattgatggttgcggcttgtgttgctgctatgcctcttttgaagaagataccaacttcagt

SEQ ID NO: 15468 - DNA, 471 bp, Glycine max
  unsure at all n locations
ntcactcgaatgtccgattcatgcgcatcacaattcgagacttctcgaaattgaacaacggaagctcttgatatattcaaatggtcataacttttcacttgagtgttcgattcaggcacatcacatttccagacgctcgatattgaacaacgaaagctctcgtatattcatatggtcataacttttcactcggatgtgcgattcaggcgcatcgcatttcgagacgctcaaatttgaacaacagaagctctcgagaaattcaaatggtcataacttttcactcggatgtgcgatttaggcgcatcacatttcgtgatgcttgaaattgaacaacggaagctctcgagaaattcaaatggtcataacgtttaactcggatgtctgactcangcgcatcacatttcaagatgctcaaaattgaacaacggaagctctcgaaaaattcanatggtcataactnttcacttgagt

SEQ ID NO: 15469 - DNA, 374 bp, Glycine max
tagcttagtttcataggatcatagtgcatgctaactgtgtgtacttcgttaactccagtctccactcggactttcagaatagcagagtttcagtatgataaataactagaaagatccacaaatcaatattgaagggtcatagttattacaaccaaagtggggaaaattcagattcatcatagatagattagtaggctaattttgcatatctgacctgctgatgagactggaacatgataatggtgtagaactccagttgctggaagataccctttttgaacattatcagcatagattcgagcttcataagcatgacctgccatcacatacagagttataatatactgaaacttcaaggcctctaatagatggat

SEQ ID NO: 15470 - DNA, 405 bp, Glycine max
  unsure at all n locations
agcttggatttccttttagtagggaatctatccttcctaagatggagccaaacccagtcaccctcattaagaactagctcttttcttcctctattgcctttagttgaatacacctttgtttggttctctatttggttcttaaccctctcatgcatcttctttacaaattctgacctagattccccttctttatgtataaaagaagtgtccagtgggaggggaatgaggtctaacggtgttaggggattgaacccatagacaacctcaaaaggggactgcttggtggttctatgaacccccctgttgtaggcaaattctacatgaggaagatactcatcccaagacttatggttgcctttcagaagagcccttannagggtggataaagacctattcactacctct

SEQ ID NO: 15471 - DNA, 365 bp, Glycine max
  unsure at all n locations
agcttagttggcgggcaatataaggaatcccatttccagtccagaatatgaagagactcaatgatgggatggttcttagtgctagacggaggaaggactacaaattgagtgggtggcggtccgtgatggagtttcaatagtgaaatatgaaacgtgggatgaatcttagaagaagatggtaactggagtttgtacaggacagggcccacgcgttcgagtatttggaatggaccgtanaatcatttggccaacttggtgtaagctggcgcanatgatgtttggcgatatggtctaagacatacatacacccagttgcctactgtgaattcaagactacgacaatgagtggttgcacagttttatgt

SEQ ID NO: 15472 - DNA, 435 bp, Glycine max
  unsure at all n locations
ntggcagatcaaggatattggacttcattcattgatatattagcattgttggggctcgggaccatactctttccaaatgtagacggcctagtggatttagcaacgatcgacgcttttcttgcttatcaccacaataaggaaagcccggtcattactgatgcaatcctccctaggaagggacaagtcactagagccatgagcaaaaggctccaagaggattgggcaagagctgctgataaaggccctacggttcttatgaacctcagggtagatttctgagcccatgggccaaggttgggtccaattatctttgtacatattatactaggatgtcattatatgtgatccttgtatttaggagtccataatgtaagtagggtaccctagaaatatacgagtttntagcccttgtattttacggcacttagactactt

SEQ ID NO: 15473 - DNA, 417 bp, Glycine max
  unsure at all n locations
agctttgatttcctttgttccgganacctttcttttctcatgtgcacccaaacccaatctccgggttcgaagacaaccttctttctccctttgttggcttgtttagcatagcttttatttttcctctcaatttgatctttgactctctcatgaagcttcttcacatagtccgcctttgcttgaccttctttatgcttaaaaacagaaacattaggcataggcaaaagatcaagaggagttagtgggttaaaaccataaacaacttcaaaaggagaacaattagtggtgctatgaacagctctattgtaagcaaattcaacatggggtaaacaagcttcccaagtttttaagttcttcctcanaactgtcctaagcaaagttcccaaagtcctattaacaacttccgtttgcccatcg

SEQ ID NO: 15474 - DNA, 477 bp, Glycine max
  unsure at all n locations
ntgagcacattcaaatgacaataactnttgactcggttgtcttattgagtcccgttatatatccagacgctcgaaattcagaacataagctattagaaaaatcaaacgataatcacttttaactcgggtgtccgattgtgtcccgtagtatatcgagacgctcgaaattgaaaactgaatctctaagaaaaatcaaacgacaataactttttactcggatgtccaattgagtcccgtaatatatcaagacgctcgtatttgaaaatagaagctcttagcaaattcaaacgacaataactttttactcggatgtccgattgagtcccgtaatatatcgagacgctcgtaattganaagggaagctctaagaaaaatcaaacgacaatgacttttaactcggatgtcggatagagccccgcanaatatcgagatgctcgaaattganaacagaagctctgagcaaattcaaacgacaat

SEQ ID NO: 15475 - DNA, 469 bp, Glycine max
  unsure at all n locations
tcctcctcaagctgtccaaaatcccaaaaatgtcagtgccatttcattgaggtcggtaaagcagtgtcaaggacctcaacccgtagcaccttcctcatctgcaaatgaacctgcccaacttgtctctaacccagaaaaaggtaatgacaaaaatttacctaacaatttctatgcagatgaatcttccactggcaattctgatttgcagaagcagcacatccctcctcttccattccctccaagagcggtttccaacaaaaaaatggaagatgcagagaaagagatcttggaaacatttagaaaagtagaggtaaacatacctctgctggatgcaatanagcanattccaagatatggtaaattcttgaaggagctgtgcactaataaacggaagcttaaaggaagtgaacaaattagcatgggcagaaatgtctccgcattgattggtaaatctgttccccaaattcct

SEQ ID NO: 15476 - DNA, 394 bp, Glycine max
  unsure at all n locations
agcttcgatgaaaatattgagtaaaaaataaactaattagaacaagtaggagaaatatgaataaaaatcaaagaagtattatttttaaaaaattattgataaaaagcataaatagaaagttatttaatttaaatgtataaattaattcaaacgttcatttcctaatgggtgaataggtacttctgaaatatattgnggccggtaatatagtccactttcattacagtcaattgctagctgttaattaattataatttttcttttatctttttactttgatttattcaataatttttattggttaacaatttcaaatgaattctttaaaaaaaattgtcattaatattactcatcttgactcctgagttntgataattacattcctactcttgac

SEQ ID NO: 15477 - DNA, 333 bp, Glycine max
agcttgacaggctgccatagcagcaacaatatattctgcttcacatgtggacaaagcaactacactctgatacattgagcaccaagagattagtgatgctccaaaattgaaaacatacccagcagtgcttttcctatcatccttatcaccacaccaatctgaatcactataaccaaacacttctccttctatattcttctgactgtgaggatataaaatgccaagatccaatgttcctttcacatacctcagaatgctctgtgctgccaagaagtgaggagcctttggtttctccataaacctacttatcaacccaacacaataggcaatatc

SEQ ID NO: 15478 - DNA, 416 bp, Glycine max
  unsure at all n locations
agcttgctaatcacagggcatttgcaaatggcaatgtggagactcattttattgataactacaaagaagacctctttgttgatgctaacaattcagtgtctgtgaaagaagcatatgaagctgctagacttaatgcatccctggtggccgcatgcctcattgaaaaagagcatttcatattggctagaaatccacctggtaaattgtcccattcttgctgtgtaatgttgagttgtttttgtaattttccttggtatttacataagcatgttcagggggcagcagcttgctccctatatggtattcttctccacctttcagaatccatcatcangctaagcgtagaatggaacttgagtgggataatgaatatggtagtggtagctcanagatcatgaagcttaccatcacttatc

SEQ ID NO: 15479 - DNA, 390 bp, Glycine max
  unsure at all n locations
agcttccatcaccattactttccttaactntttaaatagtgatcaagggctttccatggaccctaagagaataaaggtcattcctgagtggcctactccatcaagtataagggaaatttggggtttcaatgatttaacaaacttttacaaaaggtttgtcccatatttttctatacttgtagcaccactcattgagttggtgaggaactatgttctctcatggaaagatggtcaagaaaggcgttttcagtccttaccctactctaacatacccaacatcactaattcaatgttntaattcttttaacaggtgttgagaaaagaatccctgagtttcaagaacctctggatttgaggtcaaatcctttnttacgcattaagatcaataga

SEQ ID NO: 15480 - DNA, 454 bp, Glycine max
  unsure at all n locations
tgaaggtaaactagatgccttggttaacctgttaacccatctggccatgaataaaanatctgcacctgtcgccagactctgtggtttatgctcctctgccgaccaccacatagaccttttcccttctgtgcaacaatctgaagtaattgaacagcctgaagcttatgctgcaaacatctacaatagacctcctcaacctcagcagcaaaatcagccacaacagaacaattatgacctctccagcaacaggtacaatcccgggtggaggaatcatcccaaccttagatggtcgaatccttcacaacagcaacaacaacaacaacaaccttattttcaaaatgttgctggcccaagcagaccatacgttcctccaccaatccaacaacaaactgtngaggctcctccacaaccttcccttanagaacttgtgaggcanatgactatgcanaacatg

SEQ ID NO: 15481 - DNA, 348 bp, Glycine max
  unsure at all n locations
ttcttcatgttagagtcaatgatcaaattgagaggaanaataatagctatgctaaacaagccaacaaagggagaaagaaggttgtcttcgaacccggagattgggtttgggtgcacatgataaaagaaaggtttccggaacaaaggaaatcatagcttcaaccaaggggagatggaccatttcaagtgcttgaaagaatcaatgacaatgcttacaaagttgagctgcccggtgagtataatgttagttccaccttcaatgtctctgatttatctctctttgatgcagatggagaatccagattgaggacanatccttctcaagagggagagaatgatgangacatga

SEQ ID NO: 15482 - DNA, 280 bp, Glycine max
  unsure at all n locations
tactcagcttgaaaaatcaatggtctaactntcacacggatctccaattcatacgcatcacatattgagacgcttgaaattgaacagcggaagctcttgagaaatagtaatggtcataacttctaactcggatgtccgattcangcgactcacatatagagacgcacgagaatttaatggtcataactgttcacactaaagtcctattcaggcttataatatatcgagatactcgaaattaaacatctgaagctcttacgaaattcaatcggcataattt

SEQ ID NO: 15483 - DNA, 319 bp, Glycine max
  unsure at all n locations
agctttctagattttcgaatggtcataagttntcacacggatgtccgattcaggaaaataatatatcgagaccctcgatattgaacaacggaagccttcgagaaattcgaatggttataagtttgcacacggatgttcgattcggggacataatatatcgagacgctcaaaattgaacaacggaagctctcgagaaattcgaatggtcataacatttcactcggatgttcgattcaggtacataacttatctagacgctcgaaattgaacaacggaagctctcgacaaattttaatggtcataaattttcacacggatg

SEQ ID NO: 15484 - DNA, 386 bp, Glycine max
  unsure at all n locations
agcgtctcgatatattatgtccccgaatcggacatttgtgtgattacttatgaccattcgaatntctcgagagggtttcgtgttcaatttcgagcatctagatgagttatgtccctgagtcgaaaatccgtgtgaaaagttatgaccattcgtaattctcgagagctttcgcagttcaatttcgagcgtctcgatatattatgtccccgaatcggacatctgtgtgaaaacttatgaccattcaatattctcgacagcttctgttgttcaatntcgagcgtctcgatatattgtgtctccgaatcggacatccgtgtgaaaacttatgaccactaaaatttgtcgagagcttgcgttgttcaatttcgagcatctccatatataat

SEQ ID NO: 15485 - DNA, 417 bp, Glycine max
agcttctattctgaatttttagcatctcgatatactgcgggacacaatcgaacatccgagcaaaaagttattgtcgtttgattttgctcggagcttctgttctgtatttcgagcgtctcgatatattacgggattcattcggacattcgagtaaaaagttattgtcatttgattctgctcagagcttctgttctgaatttcgagcgtctagatatactacgggacacaatcagaaatccaagtaaaaagttattgtcgttagattttgcttagagcttctattctgaatatcgaacttctcgatatacaacgggatacaatcggacagccgagtaaaagttattgtcaatttattttgctcaaagcttctgttctgaatatcgagcgtctcgatatactacgagacacaatcggaca

SEQ ID NO: 15486 - DNA, 372 bp, Glycine max
  unsure at all n locations
acccctcagccaaatagtatccatcttgggctcttttcccacaattcttgtaaatgggagagaaatgttcatctaaagcatacaagtccctaatgttatcaaatcctanaatttgagctcctanggagcaaaacaatgtgtgtctcctagagagggcatcagctaccacaattgtttttccctttntgtatttgataacatatggaaattgctctangtactctacccattntgcatgccttttgtttaacttgctttgccctctaatgaacttaagtgattgatgatcactatgaatgacaaattccttggaaacaaggtaatgttcccaagttcggagtgctcttattaaggcataaagctctttatcat

SEQ ID NO: 15487 - DNA, 413 bp, Glycine max
atcttcaatttctcctagacactcatcataccgagggtttgtctcacatactttccaaattcttcccacttcatccacctttcctaggtttgcatagaggggaagcacaattcggcatatccaccgattctgtttataagtttccccttccatctcctttaataaagtttcagccttatcttgaagcccataagagatgtaaagcctaatcaaaacaacctgcgtagtgatgtctggttcaatgcctcgagccttcatcctatcaacaatttgatccattccatcaataacttttggactggccttctgtgtctattaagatcgaataagtatgagaagaacggttgatattctcattttccatatcaataacacatcagctatttccttcctgtcattccttctatacagaa

SEQ ID NO: 15488 - DNA, 351 bp, Glycine max
tatcttaactctattcgcattcttatctctcttgctgctacatatcgttaacctttatttcaattggatgtgaagaatgctttcttgcttggtgacttacattaagcggtgtatatagagcaatcacctgtgtttgttgcttatggggagttaggcaacgtgtgccgcttaaagaaagtgttaatggcttgatgcaatcacctagatcttggtttggagattaaggggtgtggccttgcttttgactgaagctgagtcaaagagatcatactgtaatttataacaatactaaccttggcagcatcttacttgtggatatgttatgatattgtgaaacaagaagtgatataa

SEQ ID NO: 15489 - DNA, 364 bp, Glycine max
  unsure at all n locations
gaacaggaacattagttatctgttatttcatagcaataaaagccttctcttgttgatccctccattcaaaaacaacatttttcttaacaatttcatttagatgtgcagccaangtgctaaaatctctaacaaacctcctatagaaacttgctaagtcatgaaagctccttacctcacttatattttatggggttggccaatcatgaatggctntcaccttctctagatcaacctgcattccttgcgagctaacaataaatccaagagaaatgacatggttcatacaaaacacacatctatgcacgttaacatacaatttctcacacctaagtggcttcaagatacacctcaaatgcacaacatg

SEQ ID NO: 15490 - DNA, 285 bp, Glycine max
gctggccttgaatcagaaatctgaccaccatacagacctttgcccttccatgcagcaacctggagcaattgagcagcctgaagcttatgctgcaaatatttacaatagacctcctcaacctcagcagcaaaatcaaccacagcagagcaattatgacctctccagcaacagatacaaccctggatggaggaatcaccctaacctcagatggtccagccctcagcaacaacaacagcagtctgctccttcctttccaaatgctgctggcccaaacagaccatacat

SEQ ID NO: 15491 - DNA, 372 bp, Glycine max
  unsure at all n locations
tactatccgtttcagacattcttctgataaattcataagcaagatccagtcttccacactttgcatacatgtctgtgatggcagatcccacattaactatattctccaatggtttctttagaatatcacaatgcaactccttccctaatttcagagcagccaaagcagcacaagctggcaaaacactagccatggttagggaattaggcaccattccctcttgaattaaccacctaaaagtggttatagcatcgatattcagcccatgaagcacataacctgagatcatagctgtgcanactgcaacatcaaccaaagtattctgctgaaaatcttgcgtgccatctccacatctcctcccttgaagtatat

SEQ ID NO: 15492 - DNA, 396 bp, Glycine max
  unsure at all n locations
gccgagttgagaacaacttaatgtgttccattagcttctcaggacgatatcttgcatacagaactcccaactcagtanagatacccatatgtgcacgctccaatcctaacccactctccattagagatatgagttcattgaagcatcctctgttctgatagtactcgctaacctcctccanatcatccaccttcaatataaaacagatagtaagtattcagacaaggtcaaaaggttagacaaagcaatcaaaagttnttctggcacttggttttagtattttgctactagctacatcctttaacttgcatttaaaggatntccaacatgggaagaattgtgtagtaattttggagtgaggagggggcaatcattcctgcaagtacaaaatccaca

SEQ ID NO: 15493 - DNA, 400 bp, Glycine max
  unsure at all n locations
tctaagattggaactaccaggcaagcaggtaagccttntatttccttcatgtgttccttttcactttagtaatgtgttatttcaattctgtggccttccatcatgtgatatacaggacagagatatcatgcgggttcttgtggagtgttgcttgcaagagaaagcttttaacaagtattataccgtgttggcttccaagttatgcgagcatgacaaaaatcataagtttactctacaggtattgattttctctccctgttgtaggatttagatgagaactaaatngtggaattgtgtactatttgcctcatgagtcanaacagttacattttttaactactcacagagagggaaaatatgactagaggaacacttattatgaaatatatgagtgcatcat

SEQ ID NO: 15494 - DNA, 368 bp, Glycine max
cgaaattgatcaacagaagctctcgagaaattcatatggtcataatttgttacacggaagtccgattcatgcgcataatatgccgagacgctcataaatgagcaacggaagctctcgagaaattcaaatggtcataacatatcacacggaggtccgattccggcggatagtatatcgagaagctcggaattgcacgacgaaagctctcgagaaattcaaatggtcataacttttaaaacggaagtaagattcaggtgcataatatatccagaaagttgaaattgaaccacggaagctgtcgatatattcaaatggtcataacttatcacacggaagatcgattcatgcgcataatatatcgagacgct

SEQ ID NO: 15495 - DNA, 406 bp, Glycine max
  unsure at all n locations
agctntgagataattcaaacaacaataactgtttacacggatatctgattgagtcatgtaatatttcgagacgctcganattgaattcngaagctctgagcaaattcaaacgacaataactttntactcggatgtcttattgaatcccataatatatcgacaagctcgaaatagaatcttgatgctctgagcaaattcaaacgacaataactntgtactcggatgtctgattgagtcctgtaatatatccacacgctccaaattgaataccgaagctctgagcaaattcaaacgacaataacttttaactcggatgtctgaatgagtcctgtaatatattgagacgctcaaaattgaatcccagagctctgagcanattcaaacgacaataactttttactcggat

SEQ ID NO: 15496 - DNA, 244 bp, Glycine max
  unsure at all n locations
aatattgtagccgatgctctntctcggcgtcatgcattactttctatgcttgaaacaaaattgattggtcttgaatgtttgagaagcatgtatgataatgatgaaacttttggagaaattcttaagaattgtgaaaaattctcagataatggtttctttatacatgaaggctttcttttcaaagaaaacaaaatgtgtgtgcctaaatgttctactagaaatgttcttgtttgtgaagcacatg

SEQ ID NO: 15497 - DNA, 393 bp, Glycine max
  unsure at all n locations
agctttgaatgcactattcaatggagttgacaagaacatcttcagactgatcaacacttgcacagtggccaaagatgcatgggagatcctgaaaatcactcatgaaggaacctccaaagtaaagatgtccagattgcaactcctggctacaaaattcgaaaatctgaagatgaaggaggaagagtgtattcatgacttccacatgaacattcttgaaattgccaatgcttgcactgccttgggagagaggataacagatganaagctggtgagaaagatcctcagatccttgcctaagagatttgacatgaaagtcactgcaatagaggaggcccaagacatttgcaacatgagagttgatgaactcattggttctcttcaaacctttgagct

SEQ ID NO: 15498 - DNA, 403 bp, Glycine max
  unsure at all n locations
tgctaatccatggaaactcctaatatctcccacactntnntgggtgggccattctttgatggccttgattntctcaaggtccacttggaccccatttctaccaactacaaaccctaagaaaactatattatctacacaaaaggtacacttctctatatttgcatagagggtgtttttcctaaggactgaaagaacttgcctgagatgtcctaagtgatcatctangctcctactctacactaaaatatcatcaaaataaataactacaaatctacctatgaaatcccttaagacatgatgcataagcctcataaaggtgcttggtgcattagtgagcccaaaaggcatcactagccattcatacaaaccaatcttggtcttgaaagcggttntccactcatca

SEQ ID NO: 15499 - DNA, 358 bp, Glycine max
  unsure at all n locations
tcatcaactacttgtttccaagggaaattctataaacagacctcccatctttaatggagtgggttaccactactggagaacccgcatgcaaatctttatagaggcaatagatttaaatatttgggaagccatagaacaaggaccttatgttccctctataatagccggaagtgcaacaatagaaaaacctatagcagattggactgaggaagaaagaagattagtacaatataatttaaaggccaaaaatattattacatctgccttaggaatagatgaatactttannggttcaaattgtanaagtgctaacgatatgtgggatacactacaagtaacacatgaaggcacaacatat

SEQ ID NO: 15500 - DNA, 400 bp, Glycine max
  unsure at all n locations
agcttttgttcttcagccaccaatccattatcttgaaaggtttaggtccccaatcattggttctagacctcaataggatggggcaatgatcagagaaatctctatccaacacgaattgagtagtatctagccattgggacagccagtcatcagaaagaaggaacctatccaatttgctcatgacagtcccattgngtctacaccatgtgaaatatctcccaacagacctaacctcctcaacctccatatctganatccaagaattaaactcagagatgctagtaagttttatcatacttcatcttgtccttacagtngtttttatcagcataggacacacccaggtctctagcaatctccctatgaagatcctcctcattctcanaataactattattga

SEQ ID NO: 15501 - DNA, 349 bp, Glycine max
  unsure at all n locations
cggagatgcctgccctagagacctgngattggtatcatagttagttagtataatataatatctaattatctattcatatcttctgagttttcaaatgggaggagggagtcaactcagtcaagtttagaaattgtaggctcatcttaagaaagaaaaagaaacacaactcacatggagccagtcaatacagcaaatattacagtcaaaaccttgccttcagtatatcctttctctattatcattgttgcaccaaaccatacagccagaccataactgcagataaaaacaaagtagagcaaaccatatcccanaccagaggctagtgcctcttgcactccagtcttatatg

SEQ ID NO: 15502 - DNA, 337 bp, Glycine max
  unsure at all n locations
agatggaccattcaagtgcttganagaatcaatgactatgcttacaaagttgagctgcccggtgagtataatgttagttccaccttcaatgtctcagacttatctctttttgatgcagatggagaatccgatttgaggacaaatccttctcatgagggagagaatgatgatgacatgaccaagaacaagggctaggatccacttgaaggacttggaggacctatgacaagggctagaacaaggaaagccaaagaagctcttcaacaagtgttgtccatactatttgaatacacacccacgcttcaaggagaaaacgtcaaagttgtgagttgtatca

SEQ ID NO: 15503 - DNA, 357 bp, Glycine max
gccacattcttcttcacgaactcatagagaggtgatgcaattgtagagaaattatgaaggaaccttctatagaagcttgctaacccatggaagctcctaatatctcccacactttttggggtgggccattcttggatggccttgattttctcaaggtccacttggaccccatttctaccaactacaaaacctaagaaaactatattatctacacaacaggtacacttctctatatttgcatagagggtggttttcctaaggactgatagaacatgcctgagatgtcctaagtgatcatctatgttcctactgtacactaaaatatcatcaaaataaacaactacaaatctacctatg

SEQ ID NO: 15504 - DNA, 400 bp, Glycine max
  unsure at all n locations
atcttcaatcttctcacaaaggagaagacaaagtaaataaggtgtgtctccaaactcttaagaggtgagtttgaatccttacatatgaaagagtcggagtccatttctgattattnttcaagaattcccgtagtttcaaatcaactagaaagaaatggtgagaagttaaaagatgtaagaattatggagaagatactatgctcgttagatcccaaatttgtgcacattgttgtgacaatcaaggaaaccaaagatttagaaactatgatgatagaaaaacttcaaggatcactgcaagcttatgatgagaagcataagaagaagcanaagatcactgagaaaatcttcaagatgcaactaaaggagaaagaagaaagtcgaggaaatgagagaagtcaac

SEQ ID NO: 15505 - DNA, 385 bp, Glycine max
  unsure at all n locations
nnggacttctatgttctgggaacctctccttncttatgtgtacccaaactccatcacctggttcaagcatgactntctttctgctttatgtggcttgccttgcatagctcgcagttttcttttcaatttgagccttcacttgctcatgcagcttcttcacatactcagctttagcctgtgcgtccttatgcttaagcatagcaatgttaggcatatgcaacaaatcaagaggaagtcaaggattaaatccatacactatcttaaatggtgaacaattagttgtgctatggacagtccgattataagcaaactcaacatgaagcaaacatgtntcccaagattaagaattttcttaaaacagtcctaacagtgacctaaagcctat

SEQ ID NO: 15506 - DNA, 336 bp, Glycine max
tttctttgagtcttttcaaacgacaataacttttgactcggatgtccgattgagagccgtagtatatcgagacgctcgtaattgaaaacggaagctctaagcacattcaaacgacattaacttttgactcaagtgtccgatggagtcctgtactatatagagatgctcgaaattgaagtctgaagctctgagataaatcaaatgacaattactttctactctgatgtccgagggaataccgcactatatcgagacacttgtaattgaagatgaagctttgaggatattctgacgaaattactttttactcggatgtccattgagtcctgtgctata

SEQ ID NO: 15507 - DNA, 379 bp, Glycine max
  unsure at all n locations
cgtgtgacaattcactgtgacagtcaaagtgccattcacttagcanatcaccaaatgtaccatgagaggacaaagcacatatatgtgaaactacacttcattagatatgtgattgaatctgagaaggtgaaggtggagaaggtttcaacagaagaaaactcagctgatatgttcacaaagtccctctctagtgtcaagttcaagcactgtctggacttgataaattntgaagatgcctaaagtagattggtataagtgcagccctgaagcacaaggtagacacttgttgatttggagtcaaggtggagaattgtggtgtgtgactcanaatcacaaatggcacaagtgagaaggctctaagaggtgctgtcataacagt

SEQ ID NO: 15508 - DNA, 310 bp, Glycine max
  unsure at all n locations
agcttgtgagatctgaagacttcttcagacatgtagaactggggaagactgacaacccaataggttcaaacgtgacctcaagtgtttgttgatcaactatcacgactaaacacgttgggtttgaacgctccccacactcaccctcgaggcactgagatccttatagtccttgagggtactctctatgttggatntgtgacttccaatcaagatggaaatcacctcttcaacaaagtgctgaacaaaggtgatgtgtttgtgttcccaatcggtctcattgatttctgcatcaatgtgggatatggcaatg

SEQ ID NO: 15509 - DNA, 334 bp, Glycine max
  unsure at all n locations
agcttctgttgttcaatttcgagcttgtttacatattatgctccctaatcggacatccgtgtganaagtgataaccaaatgaatttctcgagagcttctgatgtttaatttcgagagtatcaatatattataaccctgaatcggacctaagtgtgaaaagctatgaccattgaatttctggagtgcttccgttgatcaatttcgcgcgtctctatatgtgagtgacctgaatcagacatccgagttaaaagctatgaccatttaaatttctcaagagcttgcgtagttcaatttctagcggctcgatatgcgatgtgtatgaattggagattcg

SEQ ID NO: 15510 - DNA, 336 bp, Glycine max
gtgcctgtatatcgatgcgcctgaagtcgacatccgagtgaagaggtatgaccatttgaatttctcgagagcttcctatgtttaattgtgagcgtctcgatatattatacgcctgaatcgaacctcagtgtgaaaagttatgaccatttgaatttctttagagcatccgctggtcattgatcagcgtctctatatgtgatgcaccttaatcggacctccgcgtgaaaagctatgaccatttgaatttctcgagagcttgcgttgttcaatttcgagcgtctcgacatattatgcgcccgaatcggacatccatgggagaagctatgaccatttgaa

SEQ ID NO: 15511 - DNA, 418 bp, Glycine max
  unsure at all n locations
agcttcaacattcaatttctagcgtctagatatattacaggactcaatcaaacatccgagtaaaatgttactgtcgtttaaatttgcttagctctccagctttaaatttcgagcgtctcgatatatgacgggactatatcagacatccgagtaaaaagttattgtcatttgaatttgcttagagattcaacattcatcttcgagtgtctcgttatattacgggactcaattatacattcgagtaaaaagttattgtcgtttgaattntctcagagcttcaacaatcaatttcgagcgtctcgatatattacgggactcaatcaggcatccgagtaaaaagttattgtcgtttgaattggctcagagcttcaacattcaatttcgagcgtctcgctatattacgggactatatcagaca

SEQ ID NO: 15512 - DNA, 405 bp, Glycine max
  unsure at all n locations
tattatgtgttgatgattataacacacacacacacatgtatatgaattgttaaaataatttatgaattaatagttcanataataaaattaaattgaaggaaattaatatatcaagattcaatgataaatacttccaatgcattnttagtttaattatttattaattntttgaattgaaaatagtatagttcaatttaatagatacatgttttgtgccatgtaaatattaatattgtgagatgttcatatgattcatgaggtgtgataacatgctgtgttgggattataacattatgattgagattgagtgtgtgtgataaattgagtatgtgttgaattgtaagatacatgtgtattaagattntatacacattgagttgtgagttatgaactgtacaatcacat

SEQ ID NO: 15513 - DNA, 333 bp, Glycine max
  unsure at all n locations
ttacaaacttaattaactgcatanaaatttactntaagatccttanataatacatatcatgagttcatgacggcaatgtttaaatgtatcaattctattaaatttgagctcgttcaattatttcatacgtattattaatataatttctaaaataattattataaaaattaacgataagtatgattacatgaaagtgtataattaatttatattattgatacctagtctattttgtcatatcttcacttttaaatntgaattgtacatctaacaatntaatacataatattgaatcaacagtcaaacaaataattcaaccaatttatcttctta

SEQ ID NO: 15514 - DNA, 408 bp, Glycine max
  unsure at all n locations
atcttattctactanggactttagacaacatgcatttcattnttttcttttcgaaatcatacaaattgttcacattcatggtagcaacatgcctaaagggaaccttcatatcaagatgcaaatattgtaataactctntaaacctcctatgttcaacaaaagagaatggaagatcatgctcaataatcatcatagatatcatctcatgtaccacactntgatcaatntttttatttcttaatctcccagcatgatcaagaataatatttccaacatcactattagaatgccttcaaatatacatcacatttccncatatgacgttgtaggttgaagtctcattcttattgtcaccgcccacataatctttcaaacatatttgcatttactcctcactttttcatcact

SEQ ID NO: 15515 - DNA, 372 bp, Glycine max
agcttcagcctcaatttaaaaccttgcaaataaaaatcttatcatttttttttggaaaaggctgagaatgcaccgagcaataacaaagactgcgttctttgaatgataaaagggaattaccttccatatctgctgaagacacgctccaagtcacgggaacgagtcatcgaagacaagtgtccaacgtcgaggcgggtattactatatttatcatcatggcgaggcatcgttgatttcttccagctctgcaaaacaagcaactgaatgttgaaattcaattcaagaaaaaggccacacagaaacccctttttcaatggcataacgatcatcgatgacattagcaataacgtgagggaatgatgattgatgata

SEQ ID NO: 15516 - DNA, 413 bp, Glycine max
  unsure at all n locations
agtgacactatgatactcagcttctattctatntaganattcatgaaggtgttataatgtctganatctatgggattaagatggtcattgaccaatccctattntatgatttaacaaaattgcctagtgaaggtgtaccttttgagggtgcactgattgatgaatggaaattcgatttctctgtgcatgatgcccgccggttggtttgcaccaaccaagcggatatgaccggaaggcttcttgccggttcattggcttttgaaatccgcatcctccattaccttatagttcacatattgcttcctagatcttcaaaccttgcccaggtttctgaagaagatctcattgtcatgtgggcctttcataaaggtttacanattgattgngcacatcttgttagatatcgcatgcat

SEQ ID NO: 15517 - DNA, 369 bp, Glycine max
  unsure at all n locations
agagacgtggcgtttaacgagaaaggcatgaaggattggtcttcanagtctcaataggagtcgatggtgatcgctgacaaccatgaagaanattatgaaaggctactagatccaacacctgatgagccataatcatccaggaggccatagaggaatcctcaactctcagctagattgcaagattatgtcatgtttaatgacaaagatacatctaatgaagagattatcaattttactttatttgcagactgtgatccagttatttttgaagaagcctcaagtgacgagaattggagaaaggcaatggatgatgagattcgtgctattgagaagaatgacacatgtgagttggtggacttgacaacaaac

SEQ ID NO: 15518 - DNA, 393 bp, Glycine max
  unsure at all n locations
agcttctatataaggttcgttcctaatttctctacaattgcatcacctctcaatgagctagtgaagaagaatgtggcatttaactggggtgaaaaacaagagcaagcctttgctttgcttatagaagagcttactaaggcacctgttctagctcttcctaacttttctaaaacttttgagctagaatgtgatgcctctggagtgggagttggagctgttttgttgcaaggtgggcaccctattgcttattttagtgaaaaacttcatggtgcgacccttaactaccccacctatgataaagagctttatgccttaataagagcactccgaacttgggaacattaccttgtntccaagggaattgtcattcatagtgatcaacaatcacttaag

SEQ ID NO: 15519 - DNA, 235 bp, Glycine max
  unsure at all n locations
tgaatcggacctcagtgtanaaagttatgaccatttgaatntctcgggagcttccgttgttcaatttcgagcgtctgtatatgtgatacgcctgaatcgaacatccgtgtganaagttatgaccatntgaatntctcgaaagcttccttggttcaattccgagcatctcgacatattgtgtgcccgaatctgaccttcgtgtgaaaagttatgaccatttgaatttctcgagagc

SEQ ID NO: 15520 - DNA, 332 bp, Glycine max
  unsure at all n locations
atgaacaggactgctactgtgtaagaagtgtgtcgggttgggagcatacccagatgaatcccttttgaanagcggtcgatgaccacaagaatggtggtatagccacgaaatgcgggtaatccagttatgaagtcgagagacaagtcctcccatggccgacagggaactggtaccgagcataatagacatgtggccttcttagtttcatatttcgtgtgttgacagtcgacacatgaagcatattcagtgtgctcatcgaggtggtcaataatagcttgtcagaactgagcatattctaaatcttgagccaactgggcctttaattcctccag

SEQ ID NO: 15521 - DNA, 381 bp, Glycine max
  unsure at all n locations
aactgaggggctagctgggcatttgtctgctagaggaattatagcagctactgctatctgaacgtgctcaaacgtctcacttaacattaatagcacgttcactactgagccaaaacaaattcgaccgttgcttcacacgtccctctacattcctcaatcaaacttatattntcgtggtaatctcaatttcagcataccccaacagctctcagagatttacgaaatcattccaaacgctctgcttctccatggctacctcaccaaaagaaacttcagctccttgttcaccctctgtaccatcatctccatcatccaccanagcaccatcaaaccaggaacgacctgaattcaatatccagcccatacagatgattcctggtc

SEQ ID NO: 15522 - DNA, 256 bp, Glycine max
  unsure at all n locations
atcatcgagatcttcatgatanacaatagaaactagtaatccttgacttgattcgatcctcgataatgcaatgcataacatgccatggctaaagacaggatttggcagataaagttacaccatacaaggtgagacgccttgatacttgttaatagacattgcatgagataacatgattggagatagtcttctcaaaagattaagaggccacggtgattgagaacgcaacattgacattcttgggatgtaaacatta

SEQ ID NO: 15523 - DNA, 398 bp, Glycine max
  unsure at all n locations
tctcaaagggcatggttatttctagtntcctaacaatatctaagaatctcaccaaatatctgttcttctccttcttggatggtaccacaagatatggtacttccgcaccttcattcacagctttttctctctttttctctctagcttgttcacttctactcctctcttcactcttattattatcatctttttcatttcttatcattacataatactttatcttggccatttaatatctttttcttgaccattattcgctcttcttttgcctaatttccttaacctttcacatcatctttcttatcatcaatacctctattttcagcatctatcttcttgggcacgacaacactgacctcatcctccgcctccacaaacctttaacttcttgtcttcac

SEQ ID NO: 15524 - DNA, 293 bp, Glycine max
  unsure at all n locations
ntgagccaattcanacgacaataactttntactcagatgttttatatattctcgtgatataacgagacgctcgaaattgaatgtagaagctctgagctaattcaaacgacaataacattttactcggatggctgattgactcctgtcatatatcgagacgctcgagattgaatgctgtagctctgatcgcattcagacgacgataactggttacacggatgtgtgattgagtcccgtgatatatcgaaacgctcgagattgaatgtgtgatctctgagccaatccgcacgact

SEQ ID NO: 15525 - DNA, 215 bp, Glycine max
ctcggatgtccgagtccggagcataatatatcgatttgcgtcgtttagatcatcggaagctctagagagattcagatggtcataactttccacatggatgtctgaataagacgcgcaatatatcatgatgttcgaacttgaacaacggaagctctccagcaatactgatagtcataactttatcctcggagggacgattcatgcgcagaatatat

SEQ ID NO: 15526 - DNA, 307 bp, Glycine max
tgaatcggacctcagtgtgaagagttatgaccatctgaatctctcgggatcttccgttgttcaatttcgagcgtctgtatatgtgatacgcctgaatcgaacatccgtgtgaaaagttatgaccatttgaatgtctcgaaagcttgcttggttcaattccgagcatctcgacatattgtgtgcccgaatctgaccatcgtgtgaaaagttatgaccatttgaatttctcgagagcttccaatgtgtagtttcgagcgactcgatatattatacgcatgaatcggaccttagtgtaaaaagttatgac

SEQ ID NO: 15527 - DNA, 378 bp, Glycine max
  unsure at all n locations
tctgtccctgaganactggttcccagaagacaacagggagtttagattgttgtaaccctagccttgcaacaagtcctagggaagtagacacggagatggacaagaaaatccgcagtattgtgagtagcattttaaaagacgcctctgttcctgaagctgatgaagatgttccaacatcttccaccccgaatgtttctgtgcctgatgttgagaaagatgttccaacatcttccggcccaaatgctgaagccctcccttcacccagtgaagaggaatcaacagaagaagaggatcaagcctcagaggagacccctgcaccaagggcaccagaatctgctccaggtaacctcattgacttggaagaagtcgaatctgatg

SEQ ID NO: 15528 - DNA, 453 bp, Glycine max
  unsure at all n locations
ctanagtcgcatatcttanaggaaacgaatcanaattgatgatgtacatatgagactaatttggtggttcataaaatatctagctgtcaaacataagttntactaactagaaatgaatgctgggtagagcattactatcaatatgatatcaacatgataaattacctggaatagtgggtggggaaccctgatctccatagccaagtttcgctggtattttcagcttccgcttctcaccaagacacattcccaataatccctggtcccaacctgcaaagagaggtagtgatcatggaatactctatcttgaaagatttcccatcaatcataaaccagtaatttgtaacaaaattacatcatacatactagtatgattatgtaaatacacgcatgcatgtatgtgagcataaattatagctcatatgtcttggtgggtatgtaaataaataatat

SEQ ID NO: 15529 - DNA, 469 bp, Glycine max
  unsure at all n locations
tgcagacnctcctatgacacatccaggactatcatctccaagttcattcttgtcctcagcatgtgccttctccattggagatcaaggtgacatgtggagtccaaagttcacagataattcatcttttgatgtgcgcttagacaatcctttccatgtggaaagacttaaagagtgtagtgggccatatagcaccatggttgaagtatcatggctttatagagaaagtcagaagtcggctgatactgagacactgctcctgaatctagtgtgaagctgttatatacttatacttgattgagataacacactagaatgaactctttggttctaagttgagttctaatgagcatgtgctattatgttcgtatggacacttatttgtcggctagaacaagtagacctcggcatgttgaagcaccaagagaagatagctatttggatcaacatacactatgctttagcgatgcat

SEQ ID NO: 15530 - DNA, 401 bp, Glycine max
  unsure at all n locations
tcgaggtcaaccagaagaacctanactccgcggtgcaatcagacagagggtaaccccgccaacaaaccatgtcaataacgtaataagtntgatccgcctgtgccaccccaaaaatcacatacaaagaanaagaaaacagaaaacaaaaacacgacattcattcgaataacctagaaaagtagcaaattcagacctcgtgaaagatgcagtccaatatagagtaggaggggtccttcttccttgccccgctcggcaagccggagggaaaccgatgcagaacggcaccgttccgcagacggcttatcgtcgctccgttgcacgaaacgacgaaacaccgtttcccggaagggcgagcgaagacgaacctganaacgatagaaaacggagtttgttaagttaat

SEQ ID NO: 15531 - DNA, 502 bp, Glycine max
  unsure at all n locations
aggtgtatcaccttctcccaccacctccttatccgtgagggagaggaacctaattntgtccaaagcctagaatgtgcacattattcgccattaacaaatcgttcaacaattaaaaaaaaatttaaatgcaaggattttccaaatgtaaacaaaaatactttnttttaaaaaaaaaaaaaaaagcgcttacatcagaagcattggaaatcaactctctgaggaagatatccttgttactgtagagagaattgatgatgatatccataagccgcgacacttccgcttggaactcaaatttctccacgttgctctgaagagatttcttcgagatcgactacacctccctttcaatcgcaacaacacgcacacgtttatacacacaataacaagagaacaagagataaagggaaataaaacaacgaacacctcttgatgacatttgaatcggtaaaaggccatgaggcacatcactgatcttgtcctttaccttcggtggatctac

SEQ ID NO: 15532 - DNA, 339 bp, Glycine max
actcagcttgacctggaccttgcattgacccttcacttatgaagtgctctattgccttatgctctttggatagccctctatcattcccttcttcttgaaaagaatccatcctcagttgtgcatccaaaacacctacatcacaagaagacaggtcagcgacattgaaagtagagctcaccccatactcacttggtaagtcaatcttgtaagcattgtcattaattctctcaaggaccttgacaggtccatcacccctatgttggaagtcagatttcctttgtgaaggaaatctatgcttccttagatgtacccaaatctaatcttctggttcaaatacca

SEQ ID NO: 15533 - DNA, 415 bp, Glycine max
  unsure at all n locations
cctctagcaaaaggttagaaagcgtgattctccaccaacagactctctgtaaccttcaacataaatatatatgactataatggtttatttcaatcagatacattntgctctaaggacttttccaccattatcaaatattatactcttaatttctaaatgtaagtntcttttatatatggttgatattttaaaactaattttcttaaaaacttaattatataacaaaattgtgtcataccattcattntatcatactaatactttgtcaaataaatctttcatatatatatatatatgtgtgcgtgtatatttgaaatttattcttcataatgctttataacataatctatttaaaatctaatcagacaacanattgctctataccatagaatttactatagtaatacctttcatc

SEQ ID NO: 15534 - DNA, 423 bp, Glycine max
  unsure at all n locations
tcgcacttgataatggagaacacatgttcagcgctatgcaatgacattcatggtgctctgaacaaaggtggagtatggaggattgccttgagggtccgcacttangcaatcatgaaactcagctccaaactcgaaagtggaggacacatgaacagccctaagcaagaacattcatgtggctccggaaaaggatgagaatggaggattgccttaagggtcctctcttatgcaatcatgaaacacagctccaaactcaaaagtggaggacacatgaacagccctaagcaataacattcatgtggctccggaaaaggacgagaatggaggattgccttgagggtcctctcttatgcaatcatggaacacaactccatactcaaaagtggaggatacatgaacaaccctaagcaataacattcatgt

SEQ ID NO: 15535 - DNA, 454 bp, Glycine max
  unsure at all n locations
tggtaaanataaagctcattctaacctatttcactaagctntactgtcaatcttatgaatcatttgataagtgctgaattgctgattgagtaagtgcttaattaagctacttacccaaacaaaccttgattattatataacgaatgtaataaataaatacaaatcatataattttcctgattactacctttgcatgacatactgaactttggcactaagactgaactcagacataatgatacacatttcgaatacaagtcataactgataatataatgatntacttggaacagtcatatcaaaaggctttacaagtggatccttcatacaaagcagctgctgagtgcctggccattgttttaacggatattggtaccaacataaagcttgcaggaaatactcangaaggaatcaaaaatactttgaagctctcaaaatagatccacactatgct

SEQ ID NO: 15536 - DNA, 319 bp, Glycine max
  unsure at all n locations
gggatntccttntagtagggaatctatccttcctaagaatgttccaaacccagtccccctcattaagaactagctcctttcttcctctattgcccttagttgaatacacctatgtttggttctctatttgggtcttaaccctctcatgcaacttctttacaaactctgacctagattccccttctttatgtataaaaaaaagtgtcaagtgggaggggaatgaggtctaagggtgttaagggattgaacccatagacaacctcataaggggattgctcgggggttctatgaacccccctattgtacgcaaattctacat

SEQ ID NO: 15537 - DNA, 301 bp, Glycine max
tcggtattcaatttcgatcgtctcgatgtattacgtgactttatcagacatctgagtaaaaacgttattgtcgtttgaatttgctgagagcttcaacattcaatttcgagcatctcgatatattacgggactcaatcagacatccgagtaaaaagttattgtcgcttgaattttctgagagcttcaacattcaatttcgagcgtctcgatgtattatgggactctatcagacatctgagtaaaaaagttattgtcgtttgaatttgcccagagctacaacattcaatttcgagcgtcttga

SEQ ID NO: 15538 - DNA, 423 bp, Glycine max
  unsure at all n locations
ntagttcactacttcaagtagtgcacgatntgcttccagatgaaaacacgttgccaaaaagttattatcacaccaagaagatattgtgtccaatgggtatggagtattagaagattcatgtttgccctaatgattgcatattgtacatacatgagtntcaagatatgcacaaatgccctaggtgaggggtatcatggtacaaagtgaaggatgatgacgagtgtagtagtgacgaaaactcaaagaagggacccccaacgaaggtattgtggcatcttcccatcattccaaggtttaagcatctatttgctaatggagattaacggaaaaaaccttacatggcatgcanatgggtgaaactacgatggaatacttcatcattcggctgattccacccagtggaagaagattgattgttatatc

SEQ ID NO: 15539 - DNA, 313 bp, Glycine max
  unsure at all n locations
tgtaatcgattacacacatactgtaatcgattaccagaagatttttttcaganaacattctcaacagtcacatctttttgtgtggttcttgaatgagtatcataggcctataaatatgtgacttgagacacgaatttgataagagtttttcagaacaaaaaggtcttatcctcttataaagagaaatcgttttatcctcttacaaattccttggccaaattacttgtgattcaataaggaattatttgaatgctcaaattgttcaatctatctttttcaagagagatttcttcttctcttcttcttcattctg

SEQ ID NO: 15540 - DNA, 394 bp, Glycine max
  unsure at all n locations
tatcctcaaagatatattttataagaattaaattcaatttctctcattcttgttttatgataaatttatgtatttttattttaaaattagaattctaaaaacatatccttttcagattgaagaatgaaattcaactaacctgcacgaagaataaatgattctcatttacaataaattaaaggtatactttttttaacaataatacatcttttaagttcatatttcttataattagaatcaaaataataactctcttttttttttaatgagagagtatgttataaacacagacatccaataacataacagagcagcactttaaagtggaagacacttgtccctaattttccgaaagatgccatgattcttacgtggaaaagaatatntcctttat

SEQ ID NO: 15541 - DNA, 396 bp, Glycine max
  unsure at all n locations
tggacttcctatattntgngaacctctccttcctcatgtgtacccaaacccaatcacctggttcaagcacgactttctttctgcttttgttggcttgccttgcatagctcgcatttttcttttcaatttgagccttcacttgctcatgcagcttcttcacatactcagctntagcgtgtgcgtccttatgcttaaacatagcaatgttaggcataggcaacaaatcaagaggagtcaaaggattaaatccatacactatctcaaatggtgaacaattagttgtgctatggacagcccgattataagcaaactcaacatgaggcaaacatgcttcccaagatntaaggtttttctttaaaacagtcctaagcagtgtacctaaagtcctattgacta

SEQ ID NO: 15542 - DNA, 406 bp, Glycine max
  unsure at all n locations
tatctattgtgtggctgggggataatttaactctacaagcaaaatatcctactttgtatttaataagcaatcagcagacctttctatttctattttttacacatttaaaactcaaacatataaaatatataacaaactaacaaagataaagacaaaaaaaaggaaatataaactcacctcacttgctgctgctgcccatcatttcactctcacaacaaataggaatcatgtaccttcatggacggatccacataaagctctaaggagatgattgctcccattaagatattttttgtacttaaatatatttaataaaaaaattactntccaaattgggccatatgtctaattcaatcacccgcacacctttcttcagtgcatntatgatggggacgtcactgcagtc

SEQ ID NO: 15543 - DNA, 352 bp, Glycine max
  unsure at all n locations
gcttaacaatcaatttcgagcgccttgatattntacgggactcaatcagacatccgagtaaaaagttattgtcgtttgaatttgctgagtgcttcaacattcaatttcgagcgtctcgatatattacgggactcaatcagacatccgagtaaaaagttatcatcgtttgaatttggtcagagcttcaacattcaatttagagcgtctcatatattacgggactcaatcagacatccgagtaaaaaggtattgtcgctcgaaaatcctcaaagcttcggtattcaatttcgagcgtctcgatatattatgggactcaattagacatccgagtaaaaagttattggcgtttgaa

SEQ ID NO: 15544 - DNA, 358 bp, Glycine max
tgcatgagaggcttccttggggaggaagtgttacacccctccaatagcaaagctcaccccatgggaacacacacccctccaatagctaagctcaccgccccccaaaatacaaaaaaaaagaccctactacaaagactactcaaaatgccctgaaatacaaggctaaaaccctatactactagggtacccttaacttgtagggtagggtgtccttaatttgtagggtaccctacaaacctaaaattgaccaaaatacaaggcccataagatggaaaacctattctaatatttacaaagataagtaggtgcatacttagcccatggacccaaattctaccctaaggctcatgagaatcct

SEQ ID NO: 15545 - DNA, 439 bp, Glycine max
  unsure at all n locations
tgtcacacaatctgtttcataatcatattagttgtactttgttctggacatcaatacaatatgcaaacgcacgtatctttctatgcnaataaattgtttactaatgtaaaaaggtttaattactctgccgtccctgaacttttactaaattctgtgatgatgtgcattntaatatantttttattcaggctangcttgattggacttaagaaccggttcaatgttgatctattattatgtaaaaccaattttaagattgccagtatttanactaacaagcataatttattaaaattattttaatcgatttgaaaattatcttttggagttacaaaattacttattaaattgctatagtttcattttataattcatttnttaagacttaaataatttgtaagtcttgaactgtttgatgaaatttaatatttctctggat

SEQ ID NO: 15546 - DNA, 400 bp, Glycine max
  unsure at all n locations
agccttgttattactcaagaaaaggaagagaagaattggcatgtcataaatgcgtgtataacaaatattgaacatcagttacaagaggaaccctcttccctggcccagcgtgacccctgtccccatccctatccctcaccactaatntttttttctgttacatacgtgattgggaacagatacatcgttatatgatagcaagctatgcatatcaaagcttgagtcacatttgaggggtatcccaatcaaacctgcgctgtgaatagacctcataatcaattggcctagtatcaacaacgtaatcaactgtgtgaatgccctncaaaagagttggttgaaaactatcattacttgaaggcagtaatttatacacgactaataattcaagagtgaatatagc

SEQ ID NO: 15547 - DNA, 428 bp, Glycine max
  unsure at all n locations
agcttaagctccttcaactgcacaaggctcttaatatttgaagagtatccttgtggaaccttcacctgacgaagacactgacaaaaacttatcttctccttcttggacaaagtatggcaggctgggggcaagtaaattttcttcccatcagaccttggatgcaactgtgctcttatacccatatcagctagatcttgacgggtattcaagccatccttcgtcttgccttgaatgttaaggagcgtcccaataacactgtcacaaacatttttctccacatgcataacatcaatacaatgtctaacgtcaagatcacaccagtacggaagatcaaagagaatggacctcttcttcatatgcaactctgacttttatccttcttttgngtcttcccaaatacagtgttcaggtgttgaacccgctgatat

SEQ ID NO: 15548 - DNA, 423 bp, Glycine max
  unsure at all n locations
gcttggtccccaacgctctgttcaagctttcccaaaatctagaggtgaatctangatctctatcagatactatactagatggctcaccctataatctaacaatctcacttatatacagggaagtcaacttctccaaggaaaatctgatattaataagaatgaagtcagcagacttggtcagtctatcaacaataacccaaatagaatctaaacctctaggggttctaggtagtcctaccacaaaatccatggaaatactgtctcacttccactanggtatctctaaagatagtaactttcctgaaagtctctgatgttctatcttagccttctgacagattaggcatgcatacacaaactcactaacctctctcttcatattgnngccaccaaacatcatctttaaatcctgatacatcttgt

SEQ ID NO: 15549 - DNA, 434 bp, Glycine max
  unsure at all n locations
agcttatgctgcanacatctacaacagaccttctcaacctcagcagcaaaatcaaccacaatagaacaattatgacctctccagcaacaggtacaatcatgggtggaggaatcatcctaaccttagatggtcgaatccttcacaacagccgcaacaacaaccttattttcaaaatgttgctggcccaagcagaccatacgttcgtccaccaatccagcagcaacaacagcaacagccgcagaaacagcaaacagttgaggctcctccgtaaccttcccttgaagaacttgtgaggcaaatgactatgcaaaacatgcagtttcaacaagagaccagagcttccattcagagcttaactaatcagatgggacaattggctacacagttaaatcaacaacagttccagaattttgacaaattgccttctcaatctg

SEQ ID NO: 15550 - DNA, 417 bp, Glycine max
  unsure at all n locations
agcttcaacatcagaccacttccagggtgctggaactacttcacatggacttgatggggcctatgcaagttgaaagccttggaggaaagaggtatgcctatgttgatgtggatgatttctccagatttacctgcgtcaactttatcagagagaaatcagacacctttgaagtattcaaggagttgagtctaacacttcaaagagaaaaggactgtgtcatcaagagaatcaggagtgaccatggcagagagtttgaaaacagcaggttcactgaattctgcacatctgaaggcatcactcatgagttctctgcagccattacaccacaacagaatggcatagttgaaacgaataatatgactttgcaagatgctgctatggtcatgctncatgccanagaacttccctataatctct

SEQ ID NO: 15551 - DNA, 397 bp, Glycine max
  unsure at all n locations
agctttacatactcgcctagatctctttctgaaacgcgtctcgaactcggacctccacccggccgagtcaaaggccgagttcgagtccaacgcgctgcaaggccctgttgtctcgggaacgagtcanggaagcggcgagtacttcctccgagtcggaatcggaaagccaccgagtcaagcctacgtggttctcgacaccggaagcgacgtgagctggatccaatgcgcgccgtgctccgaatgctaccaacaatcggatccaatcttcgacccgatttcgtcgaattcgtactctccgatccgctgcgacgagccgcagtgttagtcactgtacctctccgagtgccgcaacagcacgtgcctctacgaagtcttctacggtgacggattctacacc

SEQ ID NO: 15552 - DNA, 432 bp, Glycine max
  unsure at all n locations
agctntgatcaaaatctaacgacaataactttntactcgaatgtccgattgtctcccattgtatatcgagacgttaaatattcagaatagaagctctgagcaaaatctaacgacaataactttttactcggatgtccgattgtgtcctgtagtatatcaagactctcgaaattcagaactgaagctctaagcaaaatcaaatgacaaaaaaattttactcggatgttcgaatgaatcccgtaatatatggagacgctcgtatttgaaaacggaagctctgagcaatatcaaacgacaataactttntactcggatgtctgattgtgtcccatagtatatcgagactctcgaaattcataacagaagctctgagcaaaatcaaacgacaatanattttaactcggatgttcgaatgtgtcccgtagtatatct

SEQ ID NO: 15553 - DNA, 415 bp, Glycine max
  unsure at all n locations
agcttgtgtattcaatatcttgatgaggatgttccatatgttctcaagactggactaatacatttgctgcccaagtttcattgtcttgcaggtgaagatcctcataagcatcttaaggagttccatattgtctattccaccatgaaaccccctgatgtccaggaagataatatctttctaaaagcttttcctcattctctggaggaagtggtgaaagattggctgtactaccttgctcccaggtccattaccggctgggatgaccttaagagggtgttcttagagaaattcttccctgcatctaggaccactgccatcagaaaatacatttcaggcatcaggcaacttagtggagagagcttgtatgagtactgngaaagattcaagaaattgtgtgcaaactgttctcaccact

SEQ ID NO: 15554 - DNA, 383 bp, Glycine max
agcttctgtccctgagaaactggttcccagaagacaacagggagtgaagattgctgaaaaccctagacttgcaacaagttctatggaagtagacacggagatggacaagataatccgcagtattgtgagtagcattctgaaagatgcttctgtgcctgatgctgagaaagatgttccaacatcgtccaccccaagtgtttctgtgcctgatgctgagaaagatgttccaacatcctccgctccaaatgctgaagccttcccttcacccagtgaagaggaatcaacagatgaagaggatcaagccgcagaggagacccctgcaccacgggcaccagaatctgttccaggtgacctcatcgacctggaagaagtcgaatctgatg

SEQ ID NO: 15555 - DNA, 405 bp, Glycine max
  unsure at all n locations
agcttttattttgatgataagtttagatatcctgagaattctgctcatggtcaactcccaagaacagtggatgtaattgcagaagacgaccttgntgattcttgcaagcctggagatcgagtggcaattgtggggatatataaggctctagcaaggaagaggtagtgtgaatggagtatttaggtagctccagacaatatactgacataactcctttgcacttgcttgctttcttgaacagaaacttgattgactgattntcatgtangactgttctcatagccaacaatgtttctcttctcaacaaagaggataatgcaccaatctacagtgttgaagatgtcaaaaacattaaagagatagctactagagatgatgcatttgatctgctaagtgattcacttg

SEQ ID NO: 15556 - DNA, 414 bp, Glycine max
  unsure at all n locations
agctngcctggtacatcactcttaggtggtgcattcatcttaccaagcccctcattgagcagtgtgttaggtacttgttcccaggttcaacaacattaacaactccatactcaagtttccttatatattctcccatgcttttacctccaacgcatgcataagcttgtatattgatgaatgcccaatagccaatataaccttctcagtttgtgaggccaattcccttgttagtgacattgttaaagcatgaaaccctgtcaaaaattaaaaaacaaacaccccatgtaaatacctagacaaaaaaatctaanatataacgcactcagttagatgtgaagcacacacaaccctttaacaatacattcttagaatatgtttgaatggaggaatttagagagaaatagcacanatgat

SEQ ID NO: 15557 - DNA, 391 bp, Glycine max
  unsure at all n locations
agcttgaatgtcgcttttgttaatcaagtgttactttatgcatttgtagatattaggctgctgtcgattattttgcattgcgatgaatgagtcagattccgaagcattgcatccagaaaacgaattatagaataaacgctttcactgtacggtccttattcaagagtctttctaacaatgagtagtagtatattaaacataattcactataaacatattttgactctcattataattatcatgtaatgtaatagaaaaaaactattccaaaataattattattttaacatcttactataatattaattattctttcctttatataacttataatattaatgattgatagtaaaatctataaatanattaataatgacaaaattaatttcat

SEQ ID NO: 15558 - DNA, 410 bp, Glycine max
  unsure at all n locations
agcttcaacatcagaccacttccagggtgctggaactacttcacatggacttgatggggcctatgcaagttgaaagccttggaggaaagaggtatgcctatgttgttgtggatgatttctccagatttacctgngtctactttatcagagagaaatcagacacctttgaagtattcaaggagttgagtctaagacttcaaagagaaaaagactgtgtcatcaagagaatcacgagtgaccatggcagagaggttgaaaacaacaggtttactgaattctgcacatctgaaggcatcactcatgagttctctgcagccattgcaccacaacagaatggcatagttgagaggaaaaacaggactttgcaagaggctgctagggtcatgcttcatgccaaagaacttccctat

SEQ ID NO: 15559 - DNA, 411 bp, Glycine max
agcttcattgcctaataggtcagcttacaaaagcaatctccaagagactcagcataaggatgcacaggctaaagttgagtatgtgaaaagattgcatgaccaagtgaaggcacaaattgcaaagaagaatgaaagctatgccaagaaagctaacaagaacaggaaggaaatgatacttgaaccaggtgattgggtttgggtacacatgaggagggagaggttccctaaacaaaggaagtccaaacttcaacctagagaagacagacctttccaagtccaatcatgttttcttattaattagtgaattatttaacactaatagggcttacaaattaagctctgtgtagttctcatgtgtgttataagcttatagcctttaggaatctgagaacacaacttgaaatgatatat

SEQ ID NO: 15560 - DNA, 438 bp, Glycine max
  unsure at all n locations
nggataagattatacggagattatggagggactnnngactactttctacaatnatgcataaaaaaaggtgtctgtcattcatctcaaactactgtttatgtatttttatgcatgcaagcactcacgtgcacatatataagtngttgactagttattaattttaattaaaacataaccatatactataatttcaattatttattgtaaaactaaaataaaattatatatttaaaaatatttatttattataattataaatatataaaaactgtctatcaacttgtggaatgtataaactacaagttagtatattaataaagagaaaatatacatataatatataatctgagacatgatattttgtcaatgaaaactaataatataaaagtatgtgattttttattggaataaaatatatagtttttaataaaattatat

SEQ ID NO: 15561 - DNA, 428 bp, Glycine max
  unsure at all n locations
tctacattcaatttcgagcttttcgatatattacggtatttttatcggacatccgagtaaaaagtgattgtggtttgaatttgctcacggcttcggtattccatttcgagcgtctcgatatattacgggactcaatcggacatccgagtaaaaagttattgttgtttgaatttgctcagagcttcggcattccatttcgagcatctcgatatattacgggactcaatcagacatccgagtaaaaagctattgtagtttgaatttgctcagggctccagcattccatttcgagcgtctcgatgtattacgggactcaatcagacatccgagtaaaaagttatagtcgtttgaatttgctcagagcttcgacattcaatntcgagcgtttcgatatattacgggactcactcagacatccgactaaaaag

SEQ ID NO: 15562 - DNA, 435 bp, Glycine max
  unsure at all n locations
ccctcgttaatttgtatatttttattcaatgacaaattttatttatggtaaagccgnnaatcatgataataattactttctttaaaaaaaaactttgataataattatcttaaaaatcatataaataattatatgtaactaattgatagtgtaaaagctattaacctaacaatacatgcttattaactcttaaaaattggtaaaactcgctagaaaacccaatcataatggttgaaaaaagacgaagaactaatattgaataattggccggcttcaatggtttcttttcatttgtttttatcttttatgatatttaactcaataaaaaatactttgtaactagaaaaaggttaaatgtcaagttacaaaaggctgtgtctgagaattacgtataaaatattatcatttaccatattattattacgtagttatcat

SEQ ID NO: 15563 - DNA, 457 bp, Glycine max
gaacttagaaactcagcttgaatctctcctttgggtggacatgattctctatgttttcatgggcgacaagcatacaacaattacagtgagattatctgatgtatttaggcgcaatgcttccttgactagctctccggcacattgctgtgggtcatcatgccttcttaatcctcggcgaacaagactaactgcaacttggctagacattacatcccaaatcccatcacacccaatgatcaagaactcatcaccctcagtcaatgtaaccagccgaacatctggctcagcaataagaggggatgcagcaccaagtggaaatttcaagtcccaatccccaagggctcgagttactgaaagataaccattgagatatccatcatcaatgaacccacctaactcctccaccctcctcttctctggtagataacttggcctgtgatcattagacatctcaaca

SEQ ID NO: 15564 - DNA, 429 bp, Glycine max
  unsure at all n locations
tgtacattcaatttcgagcgttccgatatattacgggacttcttcggacatccgagtaaaaagtaattgttgtttgaatttgttcagagcttcaacattcaatttcgagcttttcgatatattacgggactcaatcagacatccgagtaaaaagttattctcgtttgaatttgctcagggcttctgtattcaatttcgagcgtctcgatatattacgggactcaatcagacatccgagtaaaaatttattggtgtttgaatttgctcagagcttcaacattcaatttcaagcgttccgatatattacgggactcaatcagacatccgagtaaaaagttattgtcgtttgaatntgctcagagcttctacattcaatttcgagcttttcgatatattacgggactcaatcagacatccgagtaaaaagta

SEQ ID NO: 15565 - DNA, 407 bp, Glycine max
  unsure at all n locations
acctaggctgatgaagacnnctantattcaaaatgctgctggtttgcagcttctccccaaaagcctttggcagtcctgcacttagaacatgcacctcactctttcaaaatggtcctattcattctttctgccaaaccattctgttgtggagtgtgagggactgttttgtgccttttgatgcctattttcctgcaaaactcattgaactgctctgaaacaaactccaggccattgttagttcttaaaacttttaattttgtaccaagtcgatttccaacaagagtatgtcattctctgaatttttgaaaagcttccgacttatttttcaaaacatacagccatactcttcttgagaaatcatctatgatggtgagaaagtatgagcttccaccatgagtattcactct

SEQ ID NO: 15566 - DNA, 441 bp, Glycine max
tcaacatcagaccacttccagggtgctggaatacttccatggacttgatggggcctatgcaagttgaaagccttagaggaaagaggtatgcctatgttgttgtggatgattactccagatttacctgtgtcaactttatcagagaaaaatcagacacctttgaagtattcaaggagttgagtctaagacttcaaagagaaaaagactgtgtcatcaagagaatcaggagtgaccatggcagagagtttgaaaacagcaggttcactgaattctgcacatctgaaggcatcactcatgagttctctgcagccattacaccacaacagaatggcatagttgagaggaaaaacaggactttgcaagatgctgctatggtcatgcttcatgccaaagaacttccctataatctctgggctgaagccatgaacacagcatgctaca

SEQ ID NO: 15567 - DNA, 399 bp, Glycine max
  unsure at all n locations
gtccataccaggcactaagtctagggagaactcaacctctctctcacgtggtaatccggacaccttaaacacctttggaaactccctcaccaaaggtatatcactcagaggggttttgcctcaacactcatactagctaagatcatgtatacttgtgcatcctccctcaaagatgcctcaacctggttagcagacaaaaacatatcactttcactcacaccaaaagacaacagatttctcaaaatagtttaataaggcgtggttggaagataaccagtccataccaagaataacatcaatctgactcanaggtaaaacaaccaaatcaaacaaaaactatctatcagaaattaagataggacattgcaagcacacatcagatgttaaaacagacccact

SEQ ID NO: 15568 - DNA, 446 bp, Glycine max
  unsure at all n locations
tgatgataaaagtgagaagtacgtgtgtgtgggttacgtctcaatatccagngggtacaagctctatagtccaaattgtagaaagatcgtcataagtcgcgacgtggagttcgacgaagaagattgttgggattggagtgttcaagaagataagtatgattttcttccttattttgaagaagatgatgaaattgaacaaccaatcatagaggaacatattacaccacctgcctcaccgacaccaaggctggatgaaacaagttcaagtgagaggacaccgcgactaatgagcattaaagagatttatgaggtaaccaaaaacctaaacgacattaacctcttttgtcttttggtgattgtgagcctctatgctatcaagaagcgacgggaaacataaagtggaagacgccatggacgaagacatcaagtcaatcacgaagaatgat

SEQ ID NO: 15569 - DNA, 387 bp, Glycine max
  unsure at all n locations
caccttctccttccccaacgcgggcgatcatcttagcgccgaggtcgtaaaccgtttccatctcggtcgtcttgagcgtcagcttcccggtcttcgcagcggcgccagacaccgcagggcggtcgatctggacctcgaccacttccccttcaatgacttcggcttcttccttgatgcggacgccgatggccttgcggaaggcctgngtgagggcttccggtttggacatttccaatgagaagatttcgctggcagcgatcatggcaaaaggggtttcgaggccganggacttggccatgcccatggcgatggcggtcttgccggtgccgggctggcctgctaggaagaccgcgcggacggcgatcttgccatctttaatcatctgga

SEQ ID NO: 15570 - DNA, 354 bp, Glycine max
gatcattttcccctgccattcattgatcaaatgcttgagcgcttggcaagtatgtctcattacaatttttttatggtttttctggttatttacaaattcatattgctcctgaggatcaagaaaacaccacattcacctatccctttggcatttttgcctataggaggatgccctttggcctatgcaacgcctctggtaccttccaacggtgtatgcttagcattttcaatgattttttagagagttgcatagatgtgtttatggatgattttactgtttatggatcctcttttgatgcatgtttggatagtctaaatagagttcttaatagatgcattgaaactaaccctgtgc

SEQ ID NO: 15571 - DNA, 364 bp, Glycine max
atattgaaatgatgaatagtttgtgatgtttgtaactggtgtctagatatggactagtacactgcagcgaacaattttgacagcaggtccaattgttgggtttccaaaggttagtgccatccttaagtcaggaaatatggattgacaaaagtatacattattagtgctcctgcacttactatctatatgttagatacaatggcgcgcacttgatgagataaatgccggtgtgtgtgatgggaagacatatgaagaaatcaagaagaacatgccagaggagtacgagtatgtcacaaacttgtaatttgtcttatttccagttgaatgctactggtacatcagataaaaaaaaccagtgcgtggt

SEQ ID NO: 15572 - DNA, 440 bp, Glycine max
ctaagctcttctatttttttggctggaaagccaaaggggtttattctttcagggaacagcttgaagacttgggaagaggttgtagagaaatttctgaagaagtactttctagagtccaagacaactgaaggcaaggcaactatctcctcattccattaattcccaaatgaatccctgagtgaagcgcttgagagattccgtagcttgttgtgaaaaacaccaactcatggattctccgagccgattcaattgaacattttcatagatggtttgagatcgcagttcaagcagttattggatgcttctgttggaggaaaaattatattgaagacccatgaagaagcaatgaaacttattgaaatatggcagctagtgatcatgcgaatttgcgtgataggactcatgtacccacaaagagaagcctactggagctttcttca

SEQ ID NO: 15573 - DNA, 445 bp, Glycine max
  unsure at all n locations
ntgacttgagtcatcaagagattataaatatgtgaccatgtgtctgtgtntaaataatcatcatcaatcatctttgaatcatctatctttcaatctttttcaacatcatctctcaaacatctttcaatcaatctttcaatatctttctacataattttctgattcatttctcttcatatttctaaaagttttttatcaacactttctcttccaagaaaagttctttgttcaaaaacttatgctattcatctttttcgttctcttctccctttgccaaaagaacgaaggactaattgccttaattcttttgtgtctctcttctcccttacaaaagattcaaaggactaaccgcctgagaattctttcgattcttctcttccccttaagcaaaatatttcaaaggactaaccgcctgagaattctttngattcttctcttcccctta

SEQ ID NO: 15574 - DNA, 391 bp, Glycine max
  unsure at all n locations
agatcaacttgatgttctatgcttcttgaaagtgtcagtccatgaggaatctccttgggaaagacatctttaaattcctgcaataagggttgaacactaggagaaacataaatagttaactgattagaattatcactctctctctcttgtgtatcactcttttcctcaggtgtatcactcttctttttcgtattccattgtggtgcctcactattttctttctcttgttcaatttcgagcgtctcgatatattatccgcctgaatctgacgtccgtgtgaaaagttatgaccatttgaatttctagagagctttcgttgttcaatttcgagcgtctcgatatattatgcgcttgaatcggacctncgagtgaaaatctatgaccatttgaa

SEQ ID NO: 15575 - DNA, 442 bp, Glycine max
  unsure at all n locations
cattgataatagaagctatgagcaaattcaaacgacatttactttttactccgatgtccgattgtgtgccgtagtatatcgagactcccgtaattgaaaacagaagctcgtagcaaattcaaacgacaataatattctactcagatgtccgattatgtcccgtagtatatccatacgctcgtaattgaaaacagaagctcgtagaaaattcaaacgacaacaactttcaactcagatgtccgattgagtgctctaatatatcgagacgcttgaaattgaaagcagaagctcttagcatattctaaggactataacttatatctcggatgtccgattgggtaccataatatatcgagatgctcgaaattgacaatggaagctcgtagcaaatactaacgaccataacattntactcggatgtccgattgtgacccgtaatata

SEQ ID NO: 15576 - DNA, 408 bp, Glycine max
  unsure at all n locations
atttagtagatgaagatgaatccatggtcttctcttggactcctctaagaacaataacatcattgcttacactgaattgttgggagttggaagccatcttctcaatcaaattcctagcttcagcaggggtcatatcaccaagagctccaccactggcagcatcaatcatactcctctccatgttgctaagaccctcatagaaatattgaagaaggagttgctcanaaatctggtggtgaggacagcatgcacacaatttcttgaatctttcccagtactcatacaggctttctccactaagttgattgatacctgaaatgtcttttctgatggcagtggtcctagatgcaaggaagaatttctccaagaacaccctcttaaggtcatcccagctgaaaatggacctgg

SEQ ID NO: 15577 - DNA, 424 bp, Glycine max
  unsure at all n locations
agcttnctttcatacccacttcatcaaatgtcatgttacaacccctcaccgnccattaaacactgttgctcaatctccaccgaaaggtggcatgccttaccaaaaaccaccctatagggagaaatccccaaaggtgtccggtaagcggtcctatgggcctatagagcatccttaagtagcttgctccaatcctttntgttgggctgcactagcttctgcaacacttgttttatctctctattaaaaacctccgcttgtccattagtttatggatgataagctgcaacaattgtatgaacaaccccatacttttggagcaaggatgccaatgacttgttatagaagtggctcccttggtcactgataatggctctaggctgactacaacctgcaaaaagttagatctcacataatccacaacaac

SEQ ID NO: 15578 - DNA, 268 bp, Glycine max
atattatgcgctcgaatcgaacatccgtgtgaaaagtgatgaccatttgagtttctcgagagcttccgtggttcaattccgagcgtctatacatattatgtgcccgaatctgaccttcgtgtgaaaagatatgaccatttgaatttctcgagagcttccgacgttagatttctagcgtcgcgatatattgaattcctgaatcggagctccgtgtgaaaagctttgaccatatgattttctcgaaagctatcgtggtcaatttcgagcg

SEQ ID NO: 15579 - DNA, 315 bp, Glycine max
tagcttagcttatataatttcaaagatggaagatactttaacataatttatgcaggtatccatcacaatccagaagaacattgatgcttctattaaagatctagaagttcaagttggacaactgtaaaaatagctatctgaacatggaagtggatctttctcagcaaccacacaggtcaaccaatatgaacattgtaatttaattacaacaaggtgggggactgtggttggtttgaaggataataatgagaaaaagaataaagaatgagttgaaatgaatacgagataaatgatgatgtggtgactactgaaaaa

SEQ ID NO: 15580 - DNA, 384 bp, Glycine max
  unsure at all n locations
tataccttgagaggttacacggagaggaagatagtgcgagcanaaaatgggtatgtcacacgcgaggttacacagagaagaatagcacgagcatactaggtcgcgtatgacataatttaaaatatatgtccaacatcgatttccaatactaaactgatgtttacaaaatgatggtaacgttaacatcggctttttccaatataccgatgttaactagtcataacttatcatcggatctcatataacctatgttagcgtacatcagttaacatcagttcttctaaagccgatgttatcaaattagagttaacaattggttgtaccagaaaccaatgttaacgtcaccttcgttaacatcggatttttagaaatacccatgttaac

SEQ ID NO: 15581 - DNA, 437 bp, Glycine max
  unsure at all n locations
tgcttgatggcacgtgatccatggaaaggataatttcttgttgatgttgtttctttattggtaaagatagagcctatgttacagagatactaaacggctgtggactacatgctgatattgggatacctgttcttatagagcgtagcctcgtaaaaattgaaaagaacaacaaacttggaatgcatcctttacttcaacaaatgggaagagagataattcgtggaagttcaataaaggaacttgggaagcgaagtcgattgtggtttcatgaggatgtacttgatgtattgattgtcggttttgtagaggaaattattaaaaacagaggagagaagagagacaatacgtatgtggaggaaatagaattattttattctaattcaaattggtctcagtagcgatacaataaatagcanaagataaactaattagataac

SEQ ID NO: 15582 - DNA, 366 bp, Glycine max
  unsure at all n locations
acctaggagttaatgactttgtattnagtgatcttgaagcggaataatattatattgttaaataatacaacactgtaaagtatatgaaatatcaaattattaaattggaggatattaatgaactaaatattataaaaataaattattgaaacgatggaattattgtttttttaaacatgtattatgaatntaaatgctaataaaaaaataatagggatatatttgaattttaattatcttaaaataataactagtttttatgtaactgataataaaaaatggtctttcttttagtgtatcctatacaaatctaaaataattggataataacactatttgctaacaaatatcatctattaataaaat

SEQ ID NO: 15583 - DNA, 448 bp, Glycine max
  unsure at all n locations
ctaagcttgatgcaacattggagaggtaatgaaacactagatgattattaacatgtnttctcatgcaacgactatgatgaggaccaaaatgtgaagcttgctgccacggagtatttcgactatgctcttgtgtggtggaacaagctacaaaaggagagagcaagatatgaagagccaatggttgatacgtggacagagatgaaaaagatcatgaggaagcggtatgtgccggctagttactcaagggacttgaaattcaagctccataaactaacaccaggcaacaagggggttgaggagtattcaaggaaatggatgtgctcatgattcaagcaaagattgtagaagatgacgagggaactatggctcgatttcttaatggtttgactaatgatattcgtgatattgtcgagctgcaagagtttgttgaatggatgatttgctcaca

SEQ ID NO: 15584 - DNA, 352 bp, Glycine max
ctaagcttgaatcggacacccgtgtgaaaagtgatgacaatttgaatcttactagaacttccgttgatcattttcgagtgtcactatgtgtgatgcgccaaaagaggacattcaagctatatattatgaccatttgaagctcaaaagagctatcgtagatcaattctgagcgcgtagtaatgggattatgcctgaatctgacgttgatatgaaatgctatgaccatgtgaagccgtaaccaccttggagagcacagtatagggcctaactagcatatatgcgcccaaatcggacattcgcctgtggaaaatgacgctaagaatgtattgaaagctttcaatgtgggatttct

SEQ ID NO: 15585 - DNA, 446 bp, Glycine max
  unsure at all n locations
tcaagaaaaagatggcctcagcaaattccttatttccaaaatgtaattctatcttagacctccaatctttaatggagagggttaccactactggaaaacccgaatgcaaatttttattgaggcaatagatctaaatatttgggaagccatagaaatagggccttatatacccaccacagtggaaagagtttcaatagatggtagttcatcaagtgaaagcataactatagaaaaacctaaagatagatggtctgaagaggatagaaaacgagtacaatacaacttataagccaaaaatataataacatctgccctgngaatggatgaatatttcanggtttcaaattgtaagagtgctaaggaaatgtgggacactcttcgattaacacatgaaggaactacggatgttaaaagatctangataaatgcactaactcatgagtatg

SEQ ID NO: 15586 - DNA, 398 bp, Glycine max
  unsure at all n locations
agcttgatctggttaacctcttttgtttgggcaactgaaaagaaatgtnattgataagaatattgacttaagctttttgcattctgtcaggtgcaagattggttgtatacagatggtgaagatgccaatgccacagagtttcaagagcgtctagatcagttaaaagctgttggagatcccaatttcttcaggtatgttatattcagtataactattaatttctttctgcatgcatatntgtggtanagtttgttctgaattggtaacatttgtttccgttaaaagacttacagctcggccagcagcagtggcatgctaataatacattgtgagttgaacaggtatcataacaatcatacatgtaagtgggcttagtgttttatttcttatgtcttttg

SEQ ID NO: 15587 - DNA, 288 bp, Glycine max
  unsure at all n locations
agcttgactcttaatnatttgtatnggnnggatgtngaattctggttgttcctggtgcggagatgatggtacaacgggtgaaccaggagcggcatttcttttggtgatgaagccatggagaaacagagcgtttggaatgatttcatacatctcagaaaactattgggaaatgctggaaaaaacacgaatgccaagcacatataaatttgaatgaagaatgtaaaggggcgtgtgaagcaacggtcgaatttgctttgtggtgaacgtgctattaatgttaagtgattc

SEQ ID NO: 15588 - DNA, 431 bp, Glycine max
  unsure at all n locations
gtcgaccaaaaggttcanaaggaagagagaagaggattgtgttggttggttatcaagttgtaggtgagatgcacgacctaagaagcatggcaggccgaacggttcaaaaattaaaatgaagaatgttgttgatgttggtaatgaagttgatggggctggtgagattacaggacctaatatacatgatcaaccaaaaggttccccaaagatgaagaagaatgctttgaaagttcataatgaagttgttggtgttggtgatatcacaggacttaagaaacgtggtcgaccaaaatgttcaataaagaaacagggtactgttgtgtacgctttcaataatgaagtgccatgtgagattgcatacaagatctggaaaatataaatgctgacaatctgtgtcaaaagtttagatgatttgcaagcctaatactaat

SEQ ID NO: 15589 - DNA, 339 bp, Glycine max
  unsure at all n locations
atattatctactcanaaagtacacttctctatatttgcatagagggtgttcttcctaaggactgatagaacttgcctgagatgtcctaagtgatcatctaggctcctactgtacactaaaatatcatcaaaataaacaactaagaatctacctatgaaatcccttaagacatgatgcataagcctcatanaggtgtttggtgcattagtgagcccaataggcatcactagccattcatacaaaccaaacttggtcttgaaagcggttatccactcatcaccctttttcattctgatttggtgatacccaactttaagatcaattcttgaaaacatattg

SEQ ID NO: 15590 - DNA, 391 bp, Glycine max
  unsure at all n locations
acaggttcaggtgcaggtgctgctactggtttatgcactttattttgctngccagacctcagggggatagcgctcacatttttcggattatgcacagtttgtgaaggcaatttgtcagaattttgggattgagctcggttcatctgagtagccatctgccccatctaatttgtcagactctgaatgaaggctcttgtctctagctgaaattgcatattctggatggtcatttgcctcactaactcctctaatgaaggttgagacggggccatagtttctcgtagtctttgttgttgttgctgcattggaggatgatcatatggcctgcttggaccaacagcattctggataagagggataagttgttgttgttgctgttgtggttgtggag

SEQ ID NO: 15591 - DNA, 292 bp, Glycine max
  unsure at all n locations
tctatctctatctttgacaagaatgagctctgataccacgtgttagacaagtggcctcagatatcttaagaaagggggggttgaattaaaatattcgaagctttttcccctaattaaaaatctatcttactntttacttaagttatgaaattccttaatgacaatcttcttaaatattaattcaaatgaagcaacttgaatatgaatataaagcaataataaataaaggagattaacggaagagaaaatgcaaactcatgtttatacttggtcggccacacccttgtgccta

SEQ ID NO: 15592 - DNA, 401 bp, Glycine max
  unsure at all n locations
tctgcaagggtcatgactactgtaggagacatgtttntcttttcttaatncttttaatattngccttctttcttcttcccttatttgttccctctcaccttgatttatcctacctctctttcccttttctttctttctagttntcctttccataacttgagggaactcaactcatctaagattctagagagagaaagtccttatgactagtaccctcaccattaacactagatgaaagatgactcctattggttcctaagttgtggttctttcttgctgggggtttgcaaaaggtaaaagctagggtttaaaagaactcaagataagcgtgataatcaagaagaaagtattatgtaataacaagataaactaggtgtgactattaaagaaaatatgctatg

SEQ ID NO: 15593 - DNA, 465 bp, Glycine max
  unsure at all n locations
acacttagcaactcaagcttgtgcattcaatatgctgataagggtgttccatatgttctctttactggactaataaatttgctgcccaagtttcatggtcttgcagatgaagatcctcataagcatcttaaggagttccatattgtctattcctccatgaaaccccctgatgttcaggaagatcatatctttctaaaggcttttcctcattctctggagggagtggcaaaagattggttntattaccttgctcccaggtccattaccagctgggatgaccttaagagggtgttcttggaaaaaagtttccctacatctangaccactaccatcacgaaagacattntcaggcatcagacaacttagtggagagagcttgtatgagtactgngaaagattcaagaaattgtgttcaaggtgtcctcaccaccagatttctgagcaactccttctacaatatttcta

SEQ ID NO: 15594 - DNA, 405 bp, Glycine max
  unsure at all n locations
agcttgcgtgttgtgttgcatcggggaacaatttcactgtaaaagtgggtcccaattggattcctaattttcaacttacctatttggaagtgacatcatggcagttaggtcccagctttccattgtggattcagtcacaaaaccaacttcattatgttggactatctaacacggngattntcgattctattcccacacagatgtgggaagcactntctcaggttttgtatttaaacctctctcgtaatcatatccatggtgagattgggactacattaaagaatccaatatctatcccaactattgatctaagctcanatcacttgtgtggtaaattaccctatctttcaagtggtgtgttcggttagatctttcaagcaattcattctttgaatccatgaatga

SEQ ID NO: 15595 - DNA, 319 bp, Glycine max
atgaaccctaccctaatataaacactaacctaaccctacgcttaacaccaaaccctagacccttaacccaaaattctaatccctaaaccttaacctctgaattctaatccctaaaccctaaactctgcattctaaaccctaaaccctaaactctaaaccacaagggttagacaataaaccctacatattaaaccataatcccttaaccctaaaatttaaaccattaacccttaaccctaccttttataccctttaaccctaaatataaaaaataaaccctaaaaaataaatcctaaattctaaaccctaaacccttaac

SEQ ID NO: 15596 - DNA, 420 bp, Glycine max
  unsure at all n locations
tatgcttgaattgcttatnggatgcccattggttaacttggtaagcccagctttggccttgaaccatgaaatnntgtacctgttgcaaagggtctgtggtttgtgctcctctgctgaccaccatacagacctttgcccttccatgcagcaacctggagcaattgagcagcccgaagcttatgctgctaatatttacaatagacctcctcaacctcagcagcaagatcaaccacagcaaaataattatgacctctccagcaacagatacaaccctggatggaggaatcaccctaatctcaaatggtctagccctcagcaacaacaacagcagcctgctccttccttccanaatgttgctggcccaagcagaccatacattcctccaccaatccaacaacagcaacagccccagaaacaacc

SEQ ID NO: 15597 - DNA, 334 bp, Glycine max
  unsure at all n locations
tcacanaagtttatatggcttgaaacatgcatcgatgtagtggtacaagaagtttaatgagtttatgagcaactcaggattcanaagatgtgacatggaccattgctactatgttgagaaatatactaatagttatgttatccttgtcgtgtatgttgatgacatgttgattacaggatctagtatgatagaaattaatagtttgaagcaatagttggcagaaaactttgaaatgaaggatcttggtccagctatacaaatccttggtatgagaattcttagaaacagatcagaaggaattttgaagttgtctcaggagaaatatatacacaag

SEQ ID NO: 15598 - DNA, 401 bp, Glycine max
  unsure at all n locations
tttgatccaattcaaacgacaataactttttactcggatgtctgattgactctcgtcacatatcgagacactcgaaattgaatgttgaagctctgagccaattcaaacgacaataactttttacttggatgtctgattgaggcccgtaatatatcgaaatgctcgaaattgaatgttgaagctcctagcaaattcaaacgacaatatctttttactcggatgtctgattgaggcccgtaatatatcgagacgctcgaaaatgaatgttgaacctctgagcgaatncaaacgacaataaacttttactcagatgtctgatagaggctcgtaatatatcgagacgctccaaattgaatgtngaagctctgagctaattcaaacgacaacaactttttactcgg

SEQ ID NO: 15599 - DNA, 384 bp, Glycine max
  unsure at all n locations
tcaacattcaatttgagcgtctcgtaatattgctgtactctttcagacatccgagtaaaaatttattgtcgtttggattggctcagagattcaacattcaatttcgagcgtctcaatatattacgggactcattcagacatccgagtaaaaagttattgtcgtttgaatttgctcagaggttcaacattcaatttcgagcgtctcgatatattacaggactcaatcagacatccgagtaaaaagatattgtcgcctgaattggctcagatcttcaacattcaatttcgagcgtctcgatatatgacgggactcaatcagacatccgagtaaaagttattgtcgtttgaattgctcanagctcaacattcaatttgagcgtctcg

SEQ ID NO: 15600 - DNA, 460 bp, Glycine max
  unsure at all n locations
gcgatgcattgtcttctattttnctcaattnntgaacngtnnctcgatgatatnnntagcgcgatntcatgatcgagaccatttccaatgctaaaaaggttatttggtgcgtttgggaatttcctactgagcccttcggtttgtcaattnntggagccatcnntcgatatattacanggaaactgaaccggacatttccgtgtataaagttattggtcatnnttaaattttcttagaagcttcggatctaaattttgagcgtctcgatatattacgggactcaatcagacatccgagtcaaaagttattttcgtttgaatttgatacgagcttccgtattcaatttggagcatctctcgataaattatgacactctgtcgggcatccgagtaaaaacttattggcgttagaattttctaagaagtttcattttcatattggagcgtctcgatataatacg

SEQ ID NO: 15601 - DNA, 411 bp, Glycine max
atatggagcatctcgatatattatgtgtactcttccggacattcgagacaaaagtgattgtcgttagaatttggtacgagctttcgttttcaaattggagcatctggatatattacaggactctgtcggacatctgagtaaaaagttattgtcctctgaatttgctacgagcatccattttcaatatggaacgtctcgatatattatgggactcaatcgaacatccgtgtataaagttattctcgattgataatgctcagagcttctgatctgaattttgagcgtgtacatatattacgagactcaatagaacatccgagtaaaaagttattgttgtttgaatttgctacgaacttacattatgaatgtgcggtgcctcgatatattacgggactcaatcggacatccaag

SEQ ID NO: 15602 - DNA, 316 bp, Glycine max
  unsure at all n locations
ttcttatgttctcaatttcaagcatcttgatatattacaggacacaatcggacatccgagtaaaaagttatagtcatttgaatttgctcagagcttctattttcaatttcgagcgtcacgatatattacaagactcaatcagacatccgagtaaaacgttattgctgtttgaattatctcanagcttatgttctcaatntcaagcgtcttgatatattacaggactcaaccggacattcgacttaaanagtaatgtcgttagaatctgctacgagcttccgttttcaattacgagcgtctagatatattacgggac

SEQ ID NO: 15603 - DNA, 398 bp, Glycine max
  unsure at all n locations
tttactcnatgtccgaagagtcccgtatatatcgagatttctcaaattgaaaatagtagctcctagcagattcataccataataactttntactcggatgtccgattgtgtcccgtagtatatcgtgacgctcgaaattgaaaacataaggtctgagcaaattcaaacgtcaataactttttactcagatgtccaattgagtcccgtaatatatcgagatgctccaaattgaaaatagtaggtccttccaaattcaaaccataataacgttntactcggatgtctgattgagtcccgtactatatcgagacgctcgaaattgaaaaaagatgctctgagcaaattcaaacgacaataacggtttactcagatgtccgatccagtgctgtaatatatcg

SEQ ID NO: 15604 - DNA, 354 bp, Glycine max
gacacataaatactcagcttttagtttagatgatgcagatgatttgtagatacctctatgctctcctctaatgactatagcatcatttctggtgctaaactgttgggagttggaagccatcttctcaattaaatttttggcttcagtaggagtcatgtctctaaaggctccaccactggcagcatctatcatacttctctccatattactgagtccttcataaaaatattggagaagaagctgctccgaaatctgatggtgagggcaactggcacataattttttaaatctctcccagtattcgtataggctctctccactgagttgtctaatacttgagatatccttcctgat

SEQ ID NO: 15605 - DNA, 305 bp, Glycine max
  unsure at all n locations
tttcttatgtttaangaagtaagatgggngctcgagatgcatntaaaccttatctcaaccggacagcttgatgaagttgggatgatataccagttcggtgctggtagatggaagctatatagaggaagcatggtcattgctcaaggtaagaaggaatgctcctggtacatcgtgcaaggaaagatatgcatatggaagatgaatgttgctcaagatacaaccaaagaattatgacacaagagatngngtcacatgagtgagaaacgtttggagtttctaacataggatcactttccaaacataaa

SEQ ID NO: 15606 - DNA, 342 bp, Glycine max
  unsure at all n locations
tttctntggttcaggnattcatgtnncatctaggccttttgagtatgtccattttgatttatggngaccatctagaggaaaaactcatggtggaagctcatactntctcaccatcatagatgatttctccagaagagtatgattgtatgttttgaaaaataagtcagaatcttttcaaaaattcagagaatggcatactcttattggaaatcaacttggtacaaaattaaaagttttaaggactgacaatggcttggagtttgtttcagagcagttcaatgagtnttgcaggaaaataggcatcanaaggcacaaaacagtccctcacacaccacaacagaa

SEQ ID NO: 15607 - DNA, 319 bp, Glycine max
  unsure at all n locations
agctacttcttctaagttaccatgnagaaaagccgnnngtacatccagttgatgtaattccaagttaaaataagcaactaatgccattatgatgcgaaaggaatctttcatggatacaggagataaggtttctttgtagtcaactctatcccttcgagcgaatcctttggcaccaatcatgtcttgtgtctctcaatgttacctaatgaatccttcttggtatcgaaaatacatttacatacaatacgctttatcccattaggacatagcactagatcccatactgtattatttcccatagattccatatcatctttca

SEQ ID NO: 15608 - DNA, 385 bp, Glycine max
  unsure at all n locations
agcttgctcttgaggatgtaaggatatttgcagctaatgaacaactttcttaactatttgtccttcggattttactgtttttttcttatatgtaaatataaataatataaggctatggcttatggacatggtcatttttacccctaacaatcttagaagtaagtatagaccatgtttttacgcgatacccttataccatttatatttacatattagcaaaaagaaatctggatacaaaccatcaatcttcttccactgggagcaatcagccggatgacgaaccattccatcagaaatccttccatttgcatgccatgttaggtgttttgcgtcgtcctcgttagcaaanagacgcttaaaccttggaatgattggaagataccac

SEQ ID NO: 15609 - DNA, 467 bp, Glycine max
  unsure at all n locations
ctcagcttgtatttgtntatttaatccctggaacatactccattgttataatctgcattggaaacatagataatagataaataagttcagacataaaatggaaaatatgtgcattactacatttggcataataagagccatgaaggttaaacctgtggtgtggtataatcccagtagattgtaggaactttcacataatccatgttcttaaagttacttgcaaacaattctgcattagcagcctccttggtgtaatcaatctcctgaaaattattaatccatgttgcagtaacaggatcggagaatgttatttgctgagaacacgtgcatacatcataccaaaacaacagattcacaactcaagcaggaactgaaacaggaatgaccactcttatgtgtgatgatcttaagcccatatttgtattgtgtagatggttttcttacatcaagttttcctatacataaac

SEQ ID NO: 15610 - DNA, 412 bp, Glycine max
  unsure at all n locations
agcttatattctccaatgtacagattataaagcaagttccacatgatatatgcatgaaaaacaaagataacagaaattaaaattgggtttcctcccaggaagcgcttctttaacgtcattagctngacacatttacctgaatgggtgatatcaaataaacagtgttatgtgccctttcanattcttcaccatggtacaattttaacctctagccatttactacccatgttctgtcaggattctgagattgtgggtcatatagctctattgcaccataagaatcaaatttcttgataacaaagggtccagaccatntggacttcaacttaccaagaaataatttcaatcttgaattaaaatgtagtacctgttgtcccggnttgaagtctttcttcaacaaatttttgtcatg

SEQ ID NO: 15611 - DNA, 410 bp, Glycine max
  unsure at all n locations
ttctngactttcaacccttcttaaagtccccattgctcatcaatttcttgccttgtgctagtgataacaagttcagcagcatctagggaaagctcttctgcttctattctcctcattatcttatatgttgaattgatatcctccttcgattgacgcccttgcttaagaagctgttctagcttgtttcttccaagtgaatgaccagtgagcaccattggcacattcaaggcacctgaaagaagagcagcactatctccagcatcagcataatgtccatgaataacgtgtggccacactggtttccccccgctaacttgttcacccaatacttatgacatatngagaatgtgagctaaagccccatctacaaattcttgaatatggggccaaagaagttctttctgtagata

SEQ ID NO: 15612 - DNA, 399 bp, Glycine max
  unsure at all n locations
ggcgtgctttcttctctttttccctctttccaancgcgctagcagcggtttagctcctggaatgtacatctctgtaagcttcttcagatacccaattgctccgtatgaaatcatcagttacttacatttcttacttggagaaagtgatccaaggcaagaaactgcatacttttttgcagtgttctgggggcttggatcaagcaactggaccatatttggcacacttttatcattcttcttaacctctctccgattctgggacagaaccattacgcttgaattcgcttgagcagcgacctctctagcattatttgctgtatccttaagcatctatataatataagggatgccaccggctacaccaactatctttttcatctccattgagctgcaaacact

SEQ ID NO: 15613 - DNA, 428 bp, Glycine max
caattcaaatggtcataacgtttcactctgatgtcttattctagcgcataatatatcgagacgctcgaaattgaacaatggaagctcttgagcaattccaatggtcataacttttaactcggaggtccgattcaggcgcataatatgtcgagacgttcgaaatagaacaatgctagctcttgagcaattcaaattgtcataactgttcactcggaggtcagattcacgcacataatatatcgagacgctcgaaattgaacaatggaagctcttgagcaattcggatggtcataactatttcactcggacgtgcgattaaggcgcataatatatcgcgacgctcgaaattgaacaatggatgctcttgaacaatacagatggtcctaacttttcactcggatgtaccgttcacgcacataatagatcga

SEQ ID NO: 15614 - DNA, 159 bp, Glycine max
ccatgtatccaaagcccgtactaaagcatacaactccttatcataagttgaatagttcagggtaagaccacttaacttttcactaaaataagcaattggatggccttcttgcatcaacacagccccaatcccaacatttgaagcatcacacttaatttc

SEQ ID NO: 15615 - DNA, 402 bp, Glycine max
  unsure at all n locations
atgcaagctcgtttatttgattaaatatttctcttttatggtaaacattataaaaattttcaatatacgtaatacgttaaatatatagcataaaccaaagagtcaccctaattccatgaacacatacaaatgcaagatagtggacctagatgatttatcaaaggggtatattagaagcatgtgtaagtaactatgtacaagaaattttcttaaaatgcaaaacatgtatcatagtaagatgatgtatcaaagcataatatgtatattagagcaaaaagattgacatgaatgaaaatgcatcanatgtataaaccaattataacaagaaccaattttttccatactattnttttgtcatcaaactaaaaggaacgagtntcatcattgttaaaataaacaaaa

SEQ ID NO: 15616 - DNA, 397 bp, Glycine max
  unsure at all n locations
atgctgtcgcagacttgccaggtgattattttgttttggtccacacattnttcaatgagaagtgatcatggaggtgaatttcaaaatgagtcttttganaacttttgtgaagaaaatggaattcaccataattttcaaccccaagaacacctcaatagaatggcattatggagaggaaaaatagatcccttgaagaaagtgcaagaacccttctaaacgaaaccaggttgcctaagtacttttgggcagatgttgtacatactgtttgttacaccttgaaaaaagtacttattagacctattctgaagaagactccttatgaattgtataaaggaagagaaccaaacactttacacctgagagtttttggttgtaagtgtttcgttttaacaatggt

SEQ ID NO: 15617 - DNA, 440 bp, Glycine max
  unsure at all n locations
tcaacgtggtaaggcttgttaatttatccacttttagttaatttttattagaatattaatcacacatctttattttaaaagaacttaaaaaagggttggagcaatttgttggcccaaaataacaatatacaagtataggtattaaactcttatgagaaaaaaaatttatgcactgattgatatttacagtataataagttttatacaatcattcaattacaatcaatcatgtataatagattntttgatttttaaaataattataaagtaattcaaacgataattntgtgtttaactaataatataaaattgttttacattatcaatgtataggtattaaagtctaaaagataaaataaagattgaatatgtgcatcttgagaaataatgagtttttaataattatggttattttgactgcataattatgaattactata

SEQ ID NO: 15618 - DNA, 409 bp, Glycine max
  unsure at all n locations
tgccttgccccttgatatatttgaaggactcatggtcactattaatgacaaattccttgggataaaggtagtgttgccatgttttcaaagcccgtactaaggcatacaactccttatcataagttgaatagttaagggtaggaccacttaacttttcactaaaataagcaattggatggccttcttgcatcaacacagccccaatcccaacatttgaagcatcacacttaatttcaaaagatttttganagtttggcaacgaaagtatgggggcattagttagcttttgcttaagaacattgaaagcttcttcttgtgtctctccccatttganaccaacattnttcttgagcacttcattgagaggtgctgccaatgtgctaaaatccttcacaaatcgtctataaaa

SEQ ID NO: 15619 - DNA, 318 bp, Glycine max
  unsure at all n locations
agcttcaattttgcaacttaggagttgagcaggtaaaaaagattcgtcttcaaactcttagaggtgactttgagcgtttgtntatggaggagtccgagtcattttctgattttttttctcgagtattgcccgtaatcaatcaacttaaaagaaatggtgaagatgtngatgaagtgaaggtcatggaaaaaatacttcgaactttatatccaagttttgccttcattgttaccaacattgaagaaaacaaggatttaaagaccatgactattgagcaactcatgggttccttacaagcatacgaagaaaaacaaaaga

SEQ ID NO: 15620 - DNA, 409 bp, Glycine max
  unsure at all n locations
ttctntgttataaactatgtgcggcaaaacttcattactattattcagtatatacaaatgagcttgttgcaattcttctagagttggagtgataacatgcaatccncttatacctttacctctcactctctcgtcaaggcgagactccagaatcccaacagggtttgccttttccatgtacttagaacaaaactcaatagcttcttctgcaatgtacctttcaataatagatgcttcagaacagtgtagattctntatatacctttntaagatcttcatgtatcactcaatcgggtacatccaccgcannataatggaaccgcaacatttaatttccctcactagatgaacaattaagtgaaccatgatgtcaaanaattaaggaaaatacatctccaaatgacacaag

SEQ ID NO: 15621 - DNA, 394 bp, Glycine max
  unsure at all n locations
atcatccatattcaatactatttaatcatcattttaaaaaagagtgcggccaattaattntaaaaataaccaaataccttatttaaaatatatgtataccttanacatgtgtaatttgttggatcattgattatgtgtttatatattcaatagatattaactctcctttaatgtatgttttttgtcaacatgtttttcttggcttcggcttaattntattattcttcanaaaagagtgtccgggactttntgacaaanaaatggatgttntttatataaaaaanaacaatattctcaaagagtgtagtttggaaacaatntacaagacatatnttttgtcacataatatgtangagaaaccaatctcggtgtcactttatatttgttttatgtc

SEQ ID NO: 15622 - DNA, 409 bp, Glycine max
  unsure at all n locations
tatcttgtgttttggtacccacatcatcttctttctgctgttgctactttgagttccatgatgtggatggccatgtagatgatagcaaaagggctntatgtgaccatacttgccacagtagtgacacctccacttctttcttttgctccttttctgctgcgttccatgatgtcgagaccgatgttgtgacatcgtggctccagtgctgtttttggcaggaacaaattctgtcatggttgttctgccagcagacttaggattaaatccaagtcctctctggtttccaacattctttccaagctgcagcacctcatcaagcgtatctgagcctttattcagcatctttattgattctgtcatgttttccagtttagagttcagaaaaccaacttctcctttaagctcagag

SEQ ID NO: 15623 - DNA, 393 bp, Glycine max
  unsure at all n locations
cactcaagcttgcccaggtcgagaaggagcttgtccgaacaatttagctttatcaaaganaacatgtgggccatcatcgaccaatacaaggaaaagttaagcctagcggtaactcacaaacaaaggctagaggacgagtacgtgaaggtataagtcctgcaagtggaaagggaagcaagggaaagggtgatcgattcattacacagagaagcaatgatgtggatggataggttctcctttactgaaattctgatactgtggacagatgtcgtacaggatgtcacgacatcgcgcttcagaacatgcagctagtatatgaccgtatgaacagaataaacaagtaaataacacaagagaattgtaacccagttcggtgaaacgtacctacatctg

SEQ ID NO: 15624 - DNA, 388 bp, Glycine max
agcttcatcattcaatttcgagcgtctcgatatatgacgggactcaatcagacatccgagtaaaaagttattgtcgtttgaattggctcagagcttcaacattcaatttcgagggtctcgatatattgcgggactcaatcagacatccgagtaaaaagttattgtcgtttgaattggctcagagcttcaacattcaatttcgagcgtctcgatatatgacgggactcaatcagacatcctagtaaaaagttattgtcgtttgaattggctcagaggttcaacattcaatttcgagcgtctcgatatactacgggacctcatcagacatccgagtaaaacgtattgtcgtttgaatggctcagacgtcaacattcaattcgagcgtctc

SEQ ID NO: 15625 - DNA, 312 bp, Glycine max
tgagccattcagacgacaataacgtttactccgatgtcttattgagtcccttcatatatcgagacgctcgaaattgaatgttgaagctctgagccaattcaaacgacaataactttttactcggatgtctgattgagtcccgtaatatatcgagaccctcgaaattgaatgttgaagctctgagccaattcaaacgacaataacgttgtactcggatgtctgattgagtcccgcaatatatcgagacactcgacattgaatgttgaatctctgagccaattcaaacgacaataactttttactcggatgtct

SEQ ID NO: 15626 - DNA, 312 bp, Glycine max
  unsure at all n locations
tttcaganaatattctcaacagtcacatctttttatgtggttcttgaatggctatcaaaggcctatatatatgtgacttgagacacgaatttgctaagagtntttcagaacaaaaaggtcttatcctcttataaagaaaaatcgttttatcctcttacaaattccttggccaaattacttgtgattcaataaggaattatttgagtgctcaaattgttcaatctatctctttcaagagagatttcttcttctcttcttcttcattctgannagggattaagagaccganggtctcttgttgtgaaataattc

SEQ ID NO: 15627 - DNA, 255 bp, Glycine max
accattaaaaaaagctgtccctccatccatctgttgcaactcaaggtcaaaatgagcaactaatgccaagattatacgaagagaatctttcttagatactggagagaaagtctctttataatctattccttcctttagagtagatcccttacaacaagacttgccttgtatctctcaatgttagctaatgaatcctttttggtcttatagacccatttacatccaatggccttcgccccattatgcgactctaca

SEQ ID NO: 15628 - DNA, 244 bp, Glycine max
  unsure at all n locations
ggagatgaaaaaaatcatgaggaagcggtatgtgccggctagttactcaagggacttgaaattcaagctccaaaaactaacccaaggcaacaagggggttgaggagtatttcaaggaaatggatgtgctcatgattcaagcacatattgaagaagatgaggaggtaactatggctcgatntcttaatggtttgactaatgatatccgtgatattgttgagctgcaagagtttgttgaaatggat

SEQ ID NO: 15629 - DNA, 398 bp, Glycine max
  unsure at all n locations
tgcattcaggaacctaacaaacaatacaagatgcttcacttccagtcctgctccaatgaataaatctttataagtaaaacatgtatgtttattctaactcaccccatcttggagcttgtcctctacagcagtggcaccaagaagaattaggttcttctcaatcttatctgatacttcctcaatcattatatcctgatcagcactgactacattcttggccctagagaatttactatcaaactccttgtattcttctgcatcaagttcacgataggccagtataaaggttctcaaacccgcatcagcatactcatgcacatngctcatggttttctcttcaaactccttcctattcttggcaagcctttcaaacatggtgctgcatgaaaacatcactc

SEQ ID NO: 15630 - DNA, 403 bp, Glycine max
  unsure at all n locations
agcttgttggtaaactatatgccttgtttaacccggtaacccaactggccatgaatcaaaaatctgcacctgtcgctagactctantggttatgctcctctgacgaccaccacacagacctttgcccttgtgtgcaacaatctgaagcaattgagcagccctaagcttatgctacaaacatctacagtaaacctcctcaacctcagtagcaaaatcagccacaacagaacaattatgacctctccagcaacaggtacaatctgcggtggaggaatcataccaatcttaaatggtcgagtacttcacaacagtagctacaacaccagccttatttgtcaaatgttgctggcccaagttgaccatacgttcactcaccgatccagcagtaacaacaacaacagca

SEQ ID NO: 15631 - DNA, 392 bp, Glycine max
gctttatgtaaactgatgccttggtaacccggaacccaactgccatgaataaaaattgccctgtcgctagctctatggttatgctcctctgccgacaccacacagacctttgccttgtgtgcaacaatctgaagcaattgagcagcctaaagcttatgctacaaacatctacagtagacctcctcaacctcagtagcaaaatcagccacaacagaacaattatgacctctccagcaacaggtacaatctcgggtggaggaatcataccaatcttagatggtcgagtccttcacaacagtagcaacaacaccagccctattttcaaaatgttgctggcccaagtagaccatacgttccttcaccaatccagcagtaacaacaacaacagcagc

SEQ ID NO: 15632 - DNA, 280 bp, Glycine max
  unsure at all n locations
tatcgagacgctcgaaattgaatgttgaagctctgagccaattcaaacaataataacgttttactcggatgtctgattgactcccgtaatataacgagacgctcgaaattgaatgttgaagctctgagccaattgaaacgacaataactntttactcggatgtctgattgagtcccatcatatatcgagacgctcgaaattgaatgttgaagctctgagccaattcaaacgacaataaactttttcacggatgtctgattgagtcccgtaacatatcgag

SEQ ID NO: 15633 - DNA, 335 bp, Glycine max
  unsure at all n locations
agctttatcatcagaccacttncagggtgctggaactacttcacatggacttgatggggcctatgcaagttgaaagccttggaggaaagaggtatgcctatgttgttgtggatgatttctccagatttacctgngtcaactttatcagagagaaatcagacacctttgaagtattcaaagagttgagtctaagacttcaaagagaanaagactgtgtcatcaagagaattangagtgaccatggcagagagtntgaaaacagcaagtttactgaattctgcacatctgaaggcatcactcatgagttctctgcagccatcacaccacaacaaaat

SEQ ID NO: 15634 - DNA, 325 bp, Glycine max
  unsure at all n locations
aaattgagtggggagaaaattttcactaattatgattagtgaattttagctatggttcagcccaccaatccaagatcaattccaagattctccactaagtgtgcttaggtgtcatgaggcatgtaaagcatgaaggacatgcacaaagtgtgactatatgatgtggcaatggggtgtagcaagcaaatgatcacctccccctctaatatttaattggattggtcttctcccaattcaattaaatntattgctcaacacacacatcaaatatggacttaattaacgtgaaattacaaaactacccctaatacacaaactatagtct

SEQ ID NO: 15635 - DNA, 232 bp, Glycine max
  unsure at all n locations
ataanatatcgagacgctcgaaattgaaaatcggaagctcttgagcaattcaaatggtcataacttctaactcgaaggtccgattgaggtgcataatatatcgagacgctcgaaattgaagaatggaagctcttgagcaattcaaatggttataacttttcactccgaggtccgatacacgtgcataatatatcgagacgctctaaattgaacaatggaagctcatgagcaa

SEQ ID NO: 15636 - DNA, 369 bp, Glycine max
  unsure at all n locations
agctttttcgtatgtgctccaaacanaagcgggcatggtggtttaataagaaacctaggggaaattactgttcatgctgaagagactgttgcttcaaagagtgcagttgagatggtcttgcgttgttctcacttggataacagggatgtcttttctaaaagtgtacgtattctatatcccatattaatgtcccctatttaattaaatacatttttttttgtttgtcattcgaaacatctctcatatattgttttctcgtangaccctcttctaagaatatcaagaatggttgagagtggacgttatattcctatatgcaagactgaagttatcgacgacaatttaaattccaaatggaatcatttgtct

SEQ ID NO: 15637 - DNA, 399 bp, Glycine max
  unsure at all n locations
agcttgtattagtatacttcaccttgctgcggtggcacttaacctggctctaatcctggctgcacttgacccaattggggtttttcagtcttaacctcttcctgaaccagggatttctgcttctccaatgattgaaacttctttggggtcttcttttccttccttgagacctcttgatagcttgtggctgattctgccgctcgtaacttaagcagcctcatctctttcctcagtgcagcattttccacctcaaatttccggacatcaacattggttcgttctacctgtgcacttgctttagacaggcattntccatctcagaaacttcttcatagtgttttcctctagagattgtttttctttnttaagacgttcaactcatctttctcttgtctcaat

SEQ ID NO: 15638 - DNA, 398 bp, Glycine max
  unsure at all n locations
agcttttactaagttcatcctaccatcctcagactgatggtcaaactgaacggaccattcattccctggaggaccttttgaggtcatgtgtcttaaagcanaaggggagagctttctttcattgatagagttcacttacaacaacagttntcactctaccattggcatggctccctatgaagctntgtatggtagaaggtgtangacacctctatgttggctaaagccctgagaagacctcaccttatgacttgaagtggtacaacaaaccaccgagaaggtcaagttgatccaagaaaggatgaagactgctcagagtangtagaaaagttatcaggataagaggangaaagacttggaattcgaggtggtgatcatgtattcttgagagtcactct

SEQ ID NO: 15639 - DNA, 403 bp, Glycine max
  unsure at all n locations
attgaacaagcggaagctctgcgtgtataatcnagtgtttttaaattntcacacagatgtccgatgcggggaaataatatatcgagacgcacgaaattgaacaacggaagctctcgagaaatttgaatggtcataacatttcactcggatgttcgatccggggacataatttatcgagacgctcgaaattgaacaaccgaagctctcgacacattagaatggtcgtaactnttcacgcgaatgttcgattctgggacataactcatctagacgctcgaaattgaacaacggaagctctcgagaaattcgaatggtcataagttttcacaccgatgttcgattcggggacataatatatcaagacgctcgaaatttgacaccggaagctttcgagaaaatcgat

SEQ ID NO: 15640 - DNA, 393 bp, Glycine max
  unsure at all n locations
taagcttatcaccatcggaagccatggataaaagcttgaaggtaggagaaaatgagtagagggagagggaaagaagggaatgaaatnttgagagagaaaagagggagaatgaggtctgaactttgaagtctaatttctcanaaataaaagttgcaaaatacacatacaaggtctctatttatagcataagtgtcatacaaaattagaaggaaatttgaatttctattcaaatttcacttgaatttgaatntgaatttatggagccaaatttggagccaaaatttcactaattatgattagagaatttcatctatggttcaacccactaatccaagatcaaatccaagattctccactaactgtgcttangtgtcatgaggcatgtaaagcatg

SEQ ID NO: 15641 - DNA, 325 bp, Glycine max
  unsure at all n locations
agcttattgacatccgtgactngatcttaagcgaagatgttcgcaagagagatntangagaatcttccaatcatgtntccanttcagcatttgatactgaaggcangggaagtactacccaaaatgatgcaatcctaccccgcaagggcattggctagaagactccaagtagattgggctagagatccaaggaaaggccctagggttctcatgagccttanggtagatntcgagcccatgggctaagtatgagcccgcttatctttgtaatattagatanggtattccttcgtctagccctgtattttggctattctagtagtat

SEQ ID NO: 15642 - DNA, 357 bp, Glycine max
  unsure at all n locations
caaatcccttgggataaaggtagtgttgccatgttttcaaagcccgtactaaagcatacaactccttatcataagttgaatagttaaaggtaggaccacttaacttttcactaaaataagcaattggatggccttcttgcatcaacacagccccaatcccaacatttgaagcatcacactcaatttcaaaagatttttgaaagtttggcaacgcaagtatgggggcattagttagctnttgcttaagaacattgaaagcttcttcttgtttctctccccatttgaaaccaacatttttcttgagcacttcattgagaggtgctgccaatgtgctaaaatccgtctataaaaacttgc

SEQ ID NO: 15643 - DNA, 186 bp, Glycine max
tatttatgacctctccagcaacaggtacaatcccggatggaggaatcatcctaaccttagatggttgaatccttcacaacagcagcagcaacaacaacatacttattttcaaaatgctgctggcccaagcataccatacgttctttcaccatccagcagcaacaggcccaaaaacagcaaacagtt

SEQ ID NO: 15644 - DNA, 349 bp, Glycine max
aggccctgatcaattctggcaattgcaccatttgtaagttttgcttcttttgatgcttgaacatcattccatttttccttgcaacattcatgaacagcatgcatcatctcgtgatgagaagtatacgctacgcagatcaaaagaactctctggttgttgcgagcagtaactctcattgccttttgcacagaacatgagaacattaaattcaaccttatggccataaccttcttacatgtatctcttctttgcatacctttgattcccatccatgatgaaagcaatatgacttggcataggaaccaccgataaaatgggcaacatgcatcttcttatataacaatataaa

SEQ ID NO: 15645 - DNA, 390 bp, Glycine max
agctttcattataataaactaagcaataaactacttcatattttccctgtgtgtgtggttgtcgtgcaatcccttctacaacttgccatgcaacattgccttgatcaaacccaagagcaagccctatggccaatctatcaataataacagaagcaacaaaaataattagattcatgataattttcttgtaacctaaatatgaaataaagaaataattaatgatataattgatcgggtaatcatgacttaattttttaattatcaagatttatcttattaaagtaattaataagagttccaaattgaaaataatagtagttattgaatactaccaatgaggattccaacatgcttgaacttatgaaattgtattattgagacacacactct

SEQ ID NO: 15646 - DNA, 478 bp, Glycine max
  unsure at all n locations
acataatactcagtagtccttgctacaagggaaaccttcgaaaaagaaaccanactgncttacatattcgataaaaaaacagaccaaatatttttttcaggggaaagaccacaaaccaggattggagttagctgcccctctaggtcaagaagacctttggcaaaagcagctgcagacatctgtttaatatgggtcatgaaaaaatggctcacatatgatgccaaaggacaaattaggcttataaacaatgcctagacatcaaacacttccaaaatgtataaaaatgtagcaaccaataatgaaaaccacttagccttcttatgattaaggtgagcacaactttaggccatacctgcacacgaccctcatcagagctgtaaatcttgagatcatgacggtatgtactatggaggcgaagaagccctgtaccttcttcttgcatttaaaccacacaaaaatttgcctttatacatactac

SEQ ID NO: 15647 - DNA, 329 bp, Glycine max
  unsure at all n locations
ngagacatatagattgaatcctagtgagctctaggacttagnttaatatctgtcaactggtcatgagaattgatgaacccagtgataatctccttggacaataatttctctcgaatgaaatgataatcaatctctatgtgtttagtcttttcatgaaagactggatatgaggcaatgtgaagagctgcctgattatcacagtataacttcatttgcaccacttcacaaaattccaactcttggagaaattgtttaatccacataagttcacatgtaaccatagccatagatcgatattcagcctctgcactagatcgagcaacaacagt

SEQ ID NO: 15648 - DNA, 455 bp, Glycine max
  unsure at all n locations
tctntgaganaacttccttgagaagctagagcttatctactcacacccctctcataactaagctcacctccttgagaagcttccttaagaagattcctaaagaagctagagcttagctacacatacctctctaatagctaagctcacctccttgagatgagaagctagagcttagctacacaccccctataatagctaagctcacccccatgacaaanaacatgaaaataataaaaaaaaagtccttattacaaagacaactcanaatgccccgaaatacaaggctaaaaccctatactactagaatggccaaaatacaaggcctagacgaagganaaacctattctaatatttacaaagataagcgggctcatacttagcccatgggctcgagatctaccctaaggctcatgagaaccctanggcctntccttggatctctagcccaatctact

SEQ ID NO: 15649 - DNA, 396 bp, Glycine max
gacacataatactcagcttatataacctttaccatgatagagataactggtggattgttgcatcaattgtagtggttctctgcctattatgggttggcatagaggatgtaagctttcatagcaaagggaccacactcaatcttgcaactcttcctgttgctgttggtctttatggttactgctactttggacatgctgtgttcccaaacatttatacatccatgacaaatccaaaccaatttccctggaatcctcttagcatggtaaatgacttttagctataatctaactcagcttccactagtccactcactaaatattaaatctcctcaagtcctgtacaaattgcaatttacaaatatagtcaaaagatataattatttggcttacgtcaac

SEQ ID NO: 15650 - DNA, 346 bp, Glycine max
  unsure at all n locations
ctagagcggttcccttatgttatcaaacataaaaagggataaggtaatattgtagccgatgctctttctcggcgtcatgcattactttctatgcttgaaacanaattgattgggcttgaatgtttgaaaagcatgtatgaaaatgatgaaacttttggagaaattttttaaaatagtgaaaaatattcagaaaatggtgtctttatacatgaaggctttcttttcaaagaaaacaaattgtgtgtgcgtaaagtctactacaaatttgttgtttgtgaacacatgaagaagttaaaggggcattttgggtccaaagactctaaaacattaaaaacattttatggct

SEQ ID NO: 15651 - DNA, 225 bp, Glycine max
  unsure at all n locations
atattatgcacccgaatcggatatccttgtgaagagttatgactatatgaatnttccgagagtttccgatgtttaatttcgagcgtatcgatatattataagctcgaatcggacatccgtgtgaaaatntatgaccatttgaatttctcaagagcttccgttgtcaatatccagcttctcgatatgtgatttgcctgaatcggacatccgtgtgaaatgtttacc

SEQ ID NO: 15652 - DNA, 387 bp, Glycine max
agcttgtaattattgaatcatcaaccatgctcgtcccagcagactacgcattctttgtagggcccatttcattctcgggcccatactgtaaacccagcatcgttttccaggtaacatatcaaacccaaagagagaaagtagcaggaataaacagagagagaaagagagaaaataacaggaaaaaaatgaaaagaaactaaataacatgatagcccacaagtgtgttcataagccaaatgtgatttggcatcaaaaaataacgtcaaccttttgtcattcaagtaagacagaacacatgtctgtcatttcccatgaatcatttacatttagttaaattttaaatatcaataaaatatttaagaaatattatagtttatttaataaata

SEQ ID NO: 15653 - DNA, 303 bp, Glycine max
gtcctgctccaatgaataaatctttataagtaaaacatgtatgtttattctaactcaccccatcttggagcttgtcctctacagcagtggcaccaagaagaattaggttcttctcaatcttatctgatacttcctcaatcattatatcctgatcagcactgactacattcttggccctagagaatatactatcaaactccttgtattcttctgcatcaaattcacgataagccagtataaagggtctcagacccgcatcaccatactcatgcacatgccccatgggtttctcttccaactccc

SEQ ID NO: 15654 - DNA, 170 bp, Glycine max
agcttttttttatattatgcacatgaatcggacctgcgagtgacaagatatggccatttgaatttttcgagagcttccgctgctcaataacgagcgtctcgatatactatactcctgaatcggacctccgagtgaaaagttaagaccatttgaatatctcgagagcttcc

SEQ ID NO: 15655 - DNA, 373 bp, Glycine max
  unsure at all n locations
gtatatgtaaatcaaccccctggatttgaaaactcagacaagactaatcatgattntagattaaaaaaggctntatatggctcanagcaatatagatactactcttttcataaagagaaaattacatgatattttattggttcaaatttatgttgatgatattatttttggatctactaatgaattattgtgcatggaattctctcatgacatgcaaagtgagtntgaaatgttaatgatgggagaacttaatttctttcttggattacaaattanacaaaccaagactggaattnntgtcaatcaatccaagtactgcanagagttaattcacatattcngaatggaaatgctancacatggctacccaatg

SEQ ID NO: 15656 - DNA, 301 bp, Glycine max
  unsure at all n locations
cctaggatcttcttcatcaatggattcctttgcttcttggaagataaatggcngcggaatggagataggaagagagagaggagacgccacttcaaagagaagatgagtctagaagaagctcaccaccataggaggccatggataagagcttggaggaagaacgagatgaatgaggggagagggagagaagagcacgcaaatttgtgctctaaatgagcctctgaatctgaagtttaatatctcaatgatcaaagttgaaaaaaatgcacatacatgacctctattatagcctaagtgtcca

SEQ ID NO: 15657 - DNA, 299 bp, Glycine max
  unsure at all n locations
tatcttgatgaggatgtgccatatgttcnttangactggactaatacattngctgcccaagtttcatggtcttgcaggtgaagatcctcataagcatcttaaggagttccatattgtctgttccaccatgaaaccccctgatgtccaggaagatcatatctttctaaaggcttttcctcattctctggagggagtggcgaaagattggttgtactaccttgctcccaagtccattactagctgggatgaccttaagagggtgttcttggagaaattcttccttgcatctangaccactt

SEQ ID NO: 15658 - DNA, 352 bp, Glycine max
  unsure at all n locations
cttcgtcaagtaagtgacagcttgatattgattttttaggccacattggtgcaagttgctgccactgtacctcttaactgttcaagtcaacaagatggcttaagggtgtggttggataaacaacttaattaagtgcttattagataagtacttatcatgtaagcccttatgtataagctatntctataataaaagtagaaataggattaaactctctcaatataagttgttagttattttcatgaggtatcatggagattggagatcttatngataagctgaaaacaacttatggacaaattataagctatgtccataagctctcccaaacacttacaagttcttatgtgac

SEQ ID NO: 15659 - DNA, 398 bp, Glycine max
  unsure at all n locations
tgcctatccaaggcattctctaggagccgaagctcctnattattggcttattccttagtggatggcgcctcctttctcctcttctcctttgtcttccgctgcatctccatggtggaaaatcaccattgaaggacctcattgaagctcaaagatccagcctccatagaagctccacaagcaagcttccatcacatcccttgtggatctttgcttgtaaaggattttacaaggttattggaaatctaaagaaccggtggttgcttggggactggatgtangcactggttgttgccgaaccagtataaacttgtgtttggcttcttcttccctacactctataattctcgctgtgtacttttaattccgctttacttaagtctaacgtattagttatgttc

SEQ ID NO: 15660 - DNA, 326 bp, Glycine max
agctttagtcctgacccggtctgcacttgtaatgtgcgatgctcttgcccagtttccaccattatcggacaaagaaagcttgaagaccgagctatgcaatttctgagaggtctgaatgaacagtatacatacattcggtctcatgtgttacttatggatcctataccacccatatcaaagatcttctcatacgtggcgcaacaagaacggcaactgttatgtaactgctctcctaatctcaattttgaatctaaggaaatctccattattgctgcaaggtccgtttgtgagtattatggacgaatcggtcaccacaaaaatgtgtg

SEQ ID NO: 15661 - DNA, 347 bp, Glycine max
ttaaaacaaagagtttttgcctctaaagaaatttttctagcttataaacttttcttcacacacactataatgatacacaatgcaaaacagatatcaaatgtactaagatgcaacaaccaagataacaaccaatacaaatgtcactcaagggagttgggcatgtataagccaaaacttcttcataaatgcctaaaactctttaactactctatttctcccaccacatcatggtcactgcactccccatgtacatacataacatacattatcacaatgacgttttcaatgtcaacaacatctcatcttaattgtcttacccacatcaacatcatgtcatctcaatatca

SEQ ID NO: 15662 - DNA, 406 bp, Glycine max
  unsure at all n locations
tgaaggtgtgtagtccaccatctggtgatagnagaatattggattgtgtctactatcattatcattgggtctccgtcattgaagtgccacttgagctgccaggtctctccacctttgggcgtattctttgaaagatctgtgcccctttttgcacatgttatgttgttgcatcctatccggaaccatatcaaaattgtactgatactgcctaatgaaggcaaccattatgtccttccaagagtggactcgagaaggttcgaggttagtgtaccaggtaacagctaccccagtaagattatcttggaaggaatgtatcagcaggtcctcatctgttacgcatgcccgcatcttccgataatacatccttagatggttctttgggcaagtagtccccttatacttgaca

SEQ ID NO: 15663 - DNA, 353 bp, Glycine max
  unsure at all n locations
agcttgatttcttagcataatcactngcatcgcacatggactcaaattcttgcccctatctggtgttgtaattcctggtgcaaacactaattgtgttttcaaatcattaaatgctctcatacattcttcattgaacacaaaagcaacatctttattcaacaaattgctcaacagtttggctactttggagaaatcttttatgaatcgcctagtgaaccctgcatgtgctaagaaacttcttattcccttgacattcangggaggaggtagtatgtcaattacattgtacacctctttccctcttactgacattttatgccccaacactattcgcttctgaaccatgaaatgac

SEQ ID NO: 15664 - DNA, 180 bp, Glycine max
taaacgccacatccttcttcaccagctcattgacaggtgatgcgattgtcgataaattatgaacgaaccttctatataagcttgctaacccatggaagctcctaatatcgtccacactctctggggtgggccattattggatggccttgattttctcatggtccacttggaccccatttc

SEQ ID NO: 15665 - DNA, 427 bp, Glycine max
  unsure at all n locations
ntggatctttgtaagcagtagaagaaaactatgatgctcctgatttatctttagatccaacggtggctcagatgaagaatcacagagaaaggaagaccaaaaagactaaggctaaaaattgccttttctctactgtgtcaaaaattatttttacaagaattatgaacttcaagtctgccaaacagatttgggattatctcagatcagaatatcaaggctgtgaaagaaccaaaggcatgcaagtactcaacttgngcagagaattcgagatgcagagcatgaaaaagactgaaacaattaaaggctacgctgaccggctgttaagcatagcaaatagagtgaggcttcttgggaaagactntcctgatgaaagaatagtgcanaanatcctggtcactatacccgagaagtatgaatcgaagatatc

SEQ ID NO: 15666 - DNA, 277 bp, Glycine max
caaaagccattcatgatttttctaaacctttgatcaacatgatgaaagcagctgggtgggaccttgatgctgctgccaactcaatcgaacctgatgttgtttatgcaaagagagctcataagaaatatgcatttgagtcttacatatgccaaagaatgttcagtggctctgagcaagaaaacttctctgtcaaatcagacaatattactgtaactaaagagagcttctttcaccaagttctcgcattaagagagatggatcccttggacatgctggg

SEQ ID NO: 15667 - DNA, 377 bp, Glycine max
  unsure at all n locations
cctcaccaaatcccttatttccagaagggaattctatcaatagacctccaatctttaatggagagggttaccactactggaaaacccgaatgcaaatttttatcgaggcaatagatctaaatatctgggaagccatagaaatagggccttatatacccaccacagtagaaagagtttcaatagatggtagttcatcaagtgaaagcataaccatagaanaacctagagatagatggtctgaagaggatagaaaacgagtacaatacaacctaaaagccaaaaacataataacatctgccctatgaatggatgaatatttcagagtttcaaattgcaagagtgctaatgaaatgtgggacactctttgattaacacat

SEQ ID NO: 15668 - DNA, 397 bp, Glycine max
  unsure at all n locations
gacacttagatactcagcttgagcaattcagcaaaatcactttttactcggatgttgattgagtcccgtaatatatcgagacgctcgaaatggaacaccgaatctctgagaaaattcaaacgacaataactttntactcggatgtcagattgagtccagaaatttgtcaagatgcttgaaattgaagaccaaagctctgagcgaattcaaacgacaataactttttactcggatgtgtgactgagtcccgtaatatatcgagacgctcggaattgattatcgaagctctgagcaaattcaaacgacaataagtttttactcggatgtctgattgagtcccgtaatatatcgagacgctagaaattgaataccgaagctctgagcaaattcaaacgat

SEQ ID NO: 15669 - DNA, 348 bp, Glycine max
  unsure at all n locations
tgctgtcttcgtatatggccacctgataatcctatcgaaaagctctccacctgcacataattccatcacaacatgaacagccacggcatccttatatgcacctttgatggatataacattacgatgccccgccaagtggtgcattatctgaatatctcttctcacatcctccacatcatcatcggtgacgagcttcctctttgcaatagatntgcaggcgcactccagccctgttgccttttccacgcacaagaacgttgtcccgaactgaccctgtccaagtttctcccagagtaaagaactcttgaaatatcggtctctctttgaacacagaataacacgaaccct

SEQ ID NO: 15670 - DNA, 397 bp, Glycine max
  unsure at all n locations
agctgaagtttcttcatttgcacaagacgctaataggngaagagtatccttgtggaaccttcacccgacgaagacactgacaaaaacttatcttctccttcttggacaaggtatggcaggctgggggcaagtaaattttcttcccatcacaccttggatgcaattgtgatcgtatacccatatcagctagatcttgatgggtattcaagccatccttcgtcttgccttgaatgttaatgagcgtaccaatcacattgtcacaaacatctttctccacatgcataacatcaatacaatgtctaacgtcaagatcacaccagtacagaagatcaaagaaaatagacctcttcttcatatgcaactctgactcttatccttcttttgggcttaccaatac

SEQ ID NO: 15671 - DNA, 321 bp, Glycine max
  unsure at all n locations
ctcaattaaatttctggcttcagcaagagtcatgtatcgaaaggctccaccactggcagcatctatcatacttctctccatattactgagtccttcataaaaatattggagaagaagttgttctgaaatctgatggtgggggcaactggcacatagttttttaaatcgctcccagtactcatacaggctctctccactgagttgtctaatacctgagatatctttcctgatggctgtggtcctggaagcaaagaaaantttttctaacaatactctcttaaagtcatcccacctcgtgatggaccttggacaaggtaatac

SEQ ID NO: 15672 - DNA, 402 bp, Glycine max
agctagccttttgcaagtgccatttggcccatgtaatgaactacatttccactatcagtgggtcctaaggagatggaggaaagtgtttctacaagagattgttgcaatgcttccaagccttgagataaagcatcctcagcctgctgggaagactgttgcagattataaattcccatcaactgctgatctgttaatggctcaaggtggttcttgatgatctgaactccaaaagacgagaaatgagtcaacaacaaactatatacacaagtgaagttactagaaaatggaagtacttaattggcaatcaccttgagaagttcggatgaacggaatccaccaagccacataaaacatctttccacaggtgtcttccacatcccattatgtatgtgtaatacatca

SEQ ID NO: 15673 - DNA, 413 bp, Glycine max
  unsure at all n locations
tgtaagaatttgtgatagtgattntgccgtagatgttgatgttttanaagtactaccggatttgtattttttatgggtgattgtgtttttacatggagttctaagaagcaagacattgtgacactttttacttgtgaagccgagtatgtagctgcaacttcttgcacatgtcatgccatttggcttagaagattgttggaggaacttcagttgttgcaaaaggaaagcacaaagatctatattgataatagatctgcacaagagcttgccaagaatccggtgttccatgaacgaagtaagtatatatatacaaggtagcatttcattagagagtgcattaccaaaaaagaagtagaattgactcatgtgataactcatgatcaagttgcggatattttcaccatgcctctcaa

SEQ ID NO: 15674 - DNA, 304 bp, Glycine max
caatcatacttccactgttgccacaggtttgggtaaatttctggtatgctgtgggaaccaattccaaatttaattttggaaactatatcttttgatcaaactgttaagcattcagaatcttttgctatcaaattacccattgccttccctactgtattgtgtggcattatgttcagtcagcatcccaatatgttaaactacactgactctgtgatgaagagagaatctcctctatccctgcattacaaactggttgaagggacacatgtcccagacattgtctcgacatctgtctcgacatcag

SEQ ID NO: 15675 - DNA, 397 bp, Glycine max
  unsure at all n locations
aatcaaaccacatgttgatttaagttatataaaatattnttaatttaactacatgtctttaaatttaaatcttaaatatataatcatattaaatatttagagaaagaaatttaccgtgtataataactctatcgtctatgattttaattcacaaaagatttcaatcctaagagcaacttaatagaaatacactacactacccaaatatacatggtggtatctagctcgacagatatttatcaaaataataataatacatgtcgtcttaatcttagattattattgattatgtaggctctagcttctcttaanttttttcctatcatgcatgtntcctttgttggtggtggtggtggtggtattattattattattattattattatcatagattatg

SEQ ID NO: 15676 - DNA, 436 bp, Glycine max
  unsure at all n locations
cttgctaaaccaaaatctgcaacaactgcttcaaagtcctcatttaacaatatatnagcagcttcgaaatcacgatgaataatctttgggtcgcaatgatcgtgcaaataagcaagccccttaacagtggtggttgtgattttagacgatctacaaaaatacaatcaatatacataaaaacatttttacttttaaaaaacatgtcgaaatttaactacaagaaattttaattgcttttatgctattttagcataggagtttatttgtattctgtttcgactgcattaaatgagatactgttgttggttttgtggaggaaattataaaaaagagaggagagaagagagacaataagtatgcagaggaaatagaattattctattctaaattcaattgttctcaacaacgatacantaaatatctaaagataactaat

SEQ ID NO: 15677 - DNA, 449 bp, Glycine max
  unsure at all n locations
taactcttgaagaagttgtttgatccagactaactcacaagtggttgtggccatagccctacattttgcttctgcactagaccgagcaacagtgttttgttttttgctcatccaagagataatattacctcaatggatacacaatatccagtagtggaccttctgtctatggagcatccagtctttaacttgtcctcatataacaatccttgtcctggagccttctcaatgttcctgagaatgcgaatcacaaccttctggtgatcaacatgaggagcttacatgaatngactaaccagtcttctatatctttctggatctgagtatggatcaccttggtctgccattaacttttgatttggatctataggaatattaacgggtcaacagttagtcatgtctggttcttcttaaatatcaagagcatactnntctttgaagactatatg

SEQ ID NO: 15678 - DNA, 390 bp, Glycine max
ttccaacctccttttcttgttagaatatcaatggttggacaagtggcctcaaatatcttaggaaggggggttgaattaaaatatcacaatctttccttattcaaaagttctattttgattttaacccaaaaacccaagatggctttcaaaatgacctcctaaataataatgcaaattaatcttactgattagaattattaagaattaaacattaaagaagtttaagggaagaaagattgcaaactcagatttatactggttcggcacaccctgtgtaaaatttgaatcaaatttctaaatagctgtataatcattttgccactacatcgattaccgagagtaatctcttgaaaaagttttgacaaaactcttaaaaatgagagaatgatg

SEQ ID NO: 15679 - DNA, 397 bp, Glycine max
  unsure at all n locations
tttgatgcatgcaagctagttttagatgttatggaatatatgctgaggcttcgcaacatgaacctgcgatactcatggtaacgaatttgttcttcactgagggcatttacaatggcagcaccctcagcattcttgggaggaaccctatgttgcagagtgttaaagaaatgccaattgttgggggtagtgggatcttcaaatatgcaaggggttcttctgtgcttaagacacatgtgcatgatgctaaagctggtgttgcaattgtcgaatacaacgtgtctgtcctgcatgtttgagtgaaataggttgaagttgctctttataatatangtttngtttggaaggtgagtttgaatctttctcttctaatctctctaattttaagtccattcgtctt

SEQ ID NO: 15680 - DNA, 390 bp, Glycine max
  unsure at all n locations
taagcttattccgatatgggctcaaaacggcagcaggtatcttcagtttctgagtaagtggtctccatggtttgttcatcaattcagttggctgaacaaaatcatcctctttttcatttccaaaaccaccttcctttggccatatagcattgccatagccataggttccctttgttcaaagagccacctattatgatcaaaatctccagtttggctcctcaccagtgctgacttcgttgacttcatcatggacaatctcctctccattntagacattccacttggtggaggaagtagaaggggatgcccattatctatagccacttcatctagttctgtgttctgatatggctccttgcatcctgngcatatcccacctnctgttttact

SEQ ID NO: 15681 - DNA, 339 bp, Glycine max
  unsure at all n locations
cattctcctaacaaagtcgaacatgccataactcaatcgtgctttttcttcaatgtcatatgtagcaaagaccttgatcctgccaagttagatgagctagaaaatgaggctaccaatacattgtgtcgcatggagatgtatttacctcctgagttcttcggcattgcggcacacttaattgttcatctggtgagggaaattaaatgttatggtcttgtatatttgtggaggatgtacccgattgaacaatactagaagatcttacaatggtgtacaaagaatctacaccgttntgaagcatctattgtgcgaaggtacattgtacaataaactattgag

SEQ ID NO: 15682 - DNA, 312 bp, Glycine max
  unsure at all n locations
ggaaaaatnggatatggcactgttagcgaagccttggcatacaagtgtccttttgtctttgtacgtagagactatntcaatggaaaaccttttttgagaaatatgcttgaggtattctattgactttctccatgttagttttttgtgtcttcaatatattttggttatgagtgcctttcaagtaattatcttatttttttagttttatcaaggtggtgttgaaatgattagaaaggatttactgacttggcactggagaccttatcttgaacgtgcgataagnttgaaccctgctatgaagcaagcattaat

SEQ ID NO: 15683 - DNA, 383 bp, Glycine max
  unsure at all n locations
catganggtgggctcatgggccactttgggatatacaagacgctcgtcttactcaaaggaaaagtttattggccccatatgaagaaaaatgtccttaagcattgcactaggtgtgtagcttgtttacaagccaagtctagggtgacgcctcatgggctatacacacccttacccatcccctctgcaccttgggtagacattagtatggactttgtccttgggcttcctagaacccaaagaggtgtagactctatctttgtggtggtggataggtttatcaagatggcacactttataccatgccacaaggtggatgatgcttaccacatctcaaaacgctttgttatggaagttgtgagactcgatggttcgcctggaccatt

SEQ ID NO: 15684 - DNA, 444 bp, Glycine max
  unsure at all n locations
ctctctggtaatcgattaccagtttattgttttcgattccagnggcaagnttggttttcaaaaagctttcaactgaatttacaacgttccaatcaatttcaaaatggtgtaatcgattacaatatattggtaatcgattactagtgtgtttgaacgttgaaattcaaattcaaatgtgaagagtcacatcctttcacacaaatgctttgtgtaatcgattacaatgatttggtaatcgattaccagtgataagctttgaataaaaatcacaagatgtaactcttccaatggttntcatgttattctaaaagttataactcttaatggttttcttgaccagacatgaagagtctatanaagcaagaccttaacttgcattntatagacattgaatacattgatttcaatcctttacaacccttgagtctctttgaacatcttctt

SEQ ID NO: 15685 - DNA, 312 bp, Glycine max
  unsure at all n locations
gctagagagatncccgatctgagagggtactgctccgtcggcatctttctttangtcaagatacaccaaatttgagagattcccaatctgaggaggaatcttccccatgattccagtatgagaagaggttgaggtgagtcaaggaagtcattgtcccaaggaaagaaggaattgacataccttctccaaggtattcattggcgctcaagtccaagtaattcaaatgctttatatcagccaaacaaggacttatctctccaccagagctccatctcctataagcttcccaatcatcattgaaaatagaatctg

SEQ ID NO: 15686 - DNA, 423 bp, Glycine max
  unsure at all n locations
ntatacgaaatgccactctactgcaagggtgaaatgtttgttaactaggaaacacaagtatatgcaccaggaaaacattgttgttgaaagaaattgtagtgttgtgattcacaagatccttccacctaagcataaagaccctgngagtgtaactattccttgttcaattggagaagtcactgtgggaaaggctcttattgatctgggagccaatattaacttaatgccactctccatgtgtagaaagttgggaaagtcagagatcatgcccactaggatgactttacaacttgctgactgctccattaccagaccatatagagtaattgaagatgtgttggtttgagtaaaacattttatcttccccgcagactttgtggtaatggatatctgtgaagataatggcattcctgtaatattggg

SEQ ID NO: 15687 - DNA, 242 bp, Glycine max
  unsure at all n locations
ttctttngatattnggcaaagttaaaaataatgttttaaaaattatactaatcattaaactaataaaatacaaagttatgatttaataattacatagtaagtaataaagtaataataattaaaaattcataattaaatactatntttttattcatacagcttatatttaaagaactttatctatcttaaagtcattttaaacagaaatttaaaaagaaaaggggggaaataaagacagtgga

SEQ ID NO: 15688 - DNA, 328 bp, Glycine max
  unsure at all n locations
agcttttttataaagcctatcaggnatgcgccaagggcgactgttccatggctctatggaccctgcttcaaacccgaaatagtgccttctttaatagaaacacctttgtttcatctccttttgcaacaaagccttcaaggtgctcaacataaatctcttcctttaggaagccatttaaaaaggctgacttgacatcaaactgataaatcttacattggtttgggttgaatagctagaacattctgattgatctagccttcaactggagcaaagtatcaaataatctactcccaaacttgacataccctttaccactacattgcttata

SEQ ID NO: 15689 - DNA, 320 bp, Glycine max
  unsure at all n locations
aaactatattatctacaccaaagggacacttctctatatttgcataaagggtgtttttcctaaagactgaaagaacttgcctgagatgtcctaagtgatcatctangctcctactgtacactaaaatatcatcaaaataaacaactacaaatctacctatgaaatcccttaagacatgatgcataagcctcataaaggtgcttggtgcattagtgagcccaaaaggcatcactagccattcatacaaaccaaacttggtcttgaaagcgattntccactcatcaccctntttagtcctgatntggtgataaccactttta

SEQ ID NO: 15690 - DNA, 450 bp, Glycine max
  unsure at all n locations
tacaaatctgttttaagtccaagcccataaataatttaaattctagataagataagacaaaatctagatgaattaatatctagatgaaataaaatctagataaaataatatctagatgagataaaatctagatatgataagataaaatctagatgaaataatatctagataagataagatntggtagcataaaattgtctgctctcttcaagtccaagcccaattccggattcaaacccaattgcttantaatttcctganattaaattaaaaacacaaaattaatccagtaggcccaaatgataaaactgcataattaatttgacaattaaggctaatcagtaattaaaatggtgacaaaaaggggtaagaaatatgagaaaatgatgacacatcaggacgacagcttttaattaaatccacaataccatgacttcagaatggtttatt

SEQ ID NO: 15691 - DNA, 371 bp, Glycine max
  unsure at all n locations
agctttatttttgcttaatatatcactttttagttgactatttttcttattagcttcctactattagtgcaaaaccattttgctatngtntcatgttttttttgctcgtgttgtgggtttgaatttgaaaattgaacgtttgtgcttaactttttgaactatacggtatgttgttgtttggatggcactatatcacatgaatgcattntggtttgcaacctggtgtgtttgcaaggggttgtgaagcgaatttaataataaataanatcaaatgctttctctctggttctttgtatatttaattgaaaagtatancatatctatagagtatcttcaattatacttaaaaaattaagtattatattaaaaaa

SEQ ID NO: 15692 - DNA, 409 bp, Glycine max
  unsure at all n locations
actggatgcattggttaactgggtttctcattggccttgaatcaaaaatttgtaactgtcgcaagggtnttgtgggttgtgctcctctgctgaccaccatacagacctttgccctttcattgcagaacctggagcaatngagcagcctgaagcttattgctgcaatatttacaatagaacctcccaaccacagcagcaaaatcaaccataacaaagcaattatgacctctccagcaatagatacaaccctggatggaggaatcaccctaacctcagatggtccagccctcagcaacaacaacagcagcctgctccttccttcaaaatgttgtggcccaacagacatacattcctcaccaatccacaacagcacaaccccagaacaaccaacagttgaggccctccacaa

SEQ ID NO: 15693 - DNA, 365 bp, Glycine max
  unsure at all n locations
ttcgtggagcttacagaccatgtcttttgaaatantctatcaaccttgtatgcccgtatggtgggtanggattagcnnaccaaatgagcacccctgtggaaatcggtctacaaacactaatatcatcgtgaaacccgtgggattattgcagcccctattattgaaatcgaggacaaatctttccatatgtgggaaggtattggaaagaggtgcagcaaaccggcagcccttctttgttcgtattttgtctgttcgcacgaaggacattgcacgatgtactggcggacatcttcttgtatatgtggccagtcaaaattctgtcgtanatgatggagagtctttgatacccctgtgtgattgtcgag

SEQ ID NO: 15694 - DNA, 446 bp, Glycine max
ggaatcggacctcagtgtcaaaagttatgaccatctgatatttctcgagagcttccgtggttcagtggcgagcatctcgacatattatgtgcccgaatctgactttcgtgtgaaaagttatgaccatttgaatttctcgagagcttccgatgtttaatttcgagcatctcaatatattgtaagcctgaatcggagctcagtgtgaaaagttatgaccatttgtatttgtcgaatgcttccttggttcaattccgagcatctcgacatattatgtccccgaatctgaccttcgtgtgaaaagttatgaccattcgaatttctcgagagcttccgttgttcagtttcgagcctctcgaaatattatgcgcccgaatcggacatccgtgtgaaaagttatgaccatctgaatttctcgagagcttacgatggttaatttctagcgactc

SEQ ID NO: 15695 - DNA, 426 bp, Glycine max
tggattaaacaacggaagctctcgagaaattcattttgttttaacttttaactcggaggtccgattcaggcgcgtaatatatcgagacgctcgaaattgaacaatggaagctattgagcaattcaaatggtcataacttttcacttggaggtctgtttcatgcacataatatatcgagactctcgaaattgaacaacggaagctctcgagaaattcaaatggtcataacttttcactcggaggtcagattcaggcgcataatatatcgagatgctcgaaattgaacaacggaagctctcaagagaatcaaatggtcataacttttcacacggaggtcagatttatgcgcataatatatcgagacgctcgatattcaacattggaagatctcgtgaaattcaaatggtcataccttttaacacggag

SEQ ID NO: 15696 - DNA, 331 bp, Glycine max
ggaaaaacctatgtgcctcattgaagttagcacccatcttttataaaactgatgggagaatatccaatcaacataacccacttgacccttttgcaccccatttttagggcttgttttgccaccacagagagcaacattctcccaagccccttcgtcttataacactccctcaagaacaagttctccatgtaaaaccctcgcttctctagaacgagagagaagttcggagaaaacaagacaaacccaacaatggaaacacctctgaaggtgtttaaattgtagtttctcgagataactattacttaatgggaaataatgatgaataattaat

SEQ ID NO: 15697 - DNA, 215 bp, Glycine max
  unsure at all n locations
ccttgaatnaaaaatctgtgcctatcgcaagggtttgtggttagtgctcctctgctgaccaccatacagacctttgcccttccatgcagcaacctgtagcaattgagcagcctgaagcttatgctgcaaatatttacaatagacctcctcaacctcagcagcaaaatcagccacagcagagcagttatgacctttccagcaacatatacaaccct

SEQ ID NO: 15698 - DNA, 324 bp, Glycine max
  unsure at all n locations
acttgttgtgatgttagctttgttcgtcaatgctttgaccttccaccaccatctgcatagatttagattattattattatatttaaattttaagccttgtatttggctatggtttatgacatttgaatacttagtatttctttcatatttacttagtatgactgaacatgatgatttatattacttgcttttggtgtttatggttatgtgtggtaaaccttattattttatgatatatatgtctagtgatatgtacttacatttggtattgtgtngatgtatgtcttataattattcatgtatggtttattntacgcactatga

SEQ ID NO: 15699 - DNA, 285 bp, Glycine max
  unsure at all n locations
agcttggttctgtgtttcagaggaaanngacgcnggcaacgtatcaagagcaatgctggcacgactactgattcaactgatcatggtagagagctagaaatagttcatatgacactaaacgaaaagttggctgatacaaaatttctcctcgtttaggatgacgtgtgggaacgaaaggcggccttaatggagaactgtgctgaatgctccttgttatggagctcagggaagtacgatccttgccacgacacgcagtgaagaagtggcttctatcatgcgggcaga

SEQ ID NO: 15700 - DNA, 405 bp, Glycine max
  unsure at all n locations
agcttnagtcntttttatctgcacaaggctcttaaaggttgaagactatccttgtggaaccttcacccgacgaagacactgacaaaaacttatcttctccttcttggacaaagtatggcaggctgggggcaagtaaattttcttcccatcagaccttggatgcaactgtgatcgtatacccatatcagctagatcttgaagggtattcaagccatccttcgtcttgccttgaatgttaaggagcgttccaatgacactatcacagacatntttttccacatgcataacatcaatacaatgtctaacgtcaagatcacaccagtactgaagatcaaagaanatggacctcttcttccatatgcaactttgacttttatccttcttttgagtcttccaatacagtat

SEQ ID NO: 15701 - DNA, 444 bp, Glycine max
  unsure at all n locations
actcaagcctaatgttntattgatgatcatcaacatattcaaagttttgtatacattggcaagaagtggggctccattgttcactatgaagttgataattggctctatatatggctctacatcgctattaaaaacggatgtactgtgtgggtaggcgggtgcagcaatgaaagcagagtatattgctgttgacaccttgagtcggccatgcaaattggctaatgaaattgctntttgaatgttggtcatagcaggtagaatgtattggaccgacctcattggtattggggccaatttcgtttccaacaacgatgtacttaaaattgacgtctcgtgagtagggtgtcacgtacttattgacccagtctctggctgcattagcgttngtcagagattgaagggtatccttagcaacgtccatgatcaactcaatgcctgaacctc

SEQ ID NO: 15702 - DNA, 361 bp, Glycine max
  unsure at all n locations
acgcatgctngacagagaagtattaggggcagagacattgtccttgtagttgtaacggattggcataccagttaaatgctccaagatattgtcctcttctgaaccatctctaggagactcgggcaacctttgctttcttctgtggtatctaactcccccaaagaccagaccacaaatgacaagcaaggttattatgacaatgaccacaacaactatggtgtgcttattgccacctccactgcccccataacccgtgccagcacctccaaccgtcgagaccttgatgtagagacataaccagaatcacaatcaggtttctgaaagcatcctacactgttcaaaaggaaacagtcccctgaac

SEQ ID NO: 15703 - DNA, 344 bp, Glycine max
  unsure at all n locations
tctgcttgatggtaaactagatgcttagttaacctggtaacccagctagcgttgaatcagaaatctatacctgtcgcaaaagtctatggtttatgctcctctgncgaccaccacacagatcttttcccttccatgcagcaacctgaagcaattgagcagcttgaagcttatgctgcaaacatttacaacagacctcctcaacctcagcagcaaaatcaaccacagcagaacaattatgacctctccagcaacagatacaatcccggatggaggaatcaccctaatctcagatggtctagccctcaacaacaacaacagcagcctgctcctttctttcaaaatga

SEQ ID NO: 15704 - DNA, 292 bp, Glycine max
  unsure at all n locations
tttttgtctttcttattcattcaatatcgagcgttgcgatatattatggactgaatcanacaaccgagtaaaaagttattgtagtttgaagttgctcagagcttcaactttcaatatcgagcgtttcgatatgttacgggactgaatcagacatcanaataaaaagttattgtcgtttgaattatctcagagcttcagtattcccattcgagcgtctcgatatattacgggactcaatcagacatccgagtaaaaagttattgtcgtttgaatttgctccaagcttcaacat

SEQ ID NO: 15705 - DNA, 414 bp, Glycine max
  unsure at all n locations
ttgagtccttaaacaacaataactgtttactcgtttgtttgattgacacctgtaatatatccagacgctcgaaattgaataccgaagctctgagcaaattcaaacgacaataagtttctactcgtatgttcgattgactctcgtaatatatcgaaacgctcgaaattgaagaccgaagttctgagcaaattcaaacgactataactttttactcggatgtctgattgagtcccgtagtatatcgagacgctccgacttgaatgccgaagctctgcgcaaattcanacgacaataacttttttcctcggatgtctgattgagtcccgtaatatatcgagacgctcggacttgaatccttagctctgagcacatcaaatgacataactnttactcgatgtcaagtgagcccgaata

SEQ ID NO: 15706 - DNA, 106 bp, Glycine max
  unsure at all n locations
agctttgtttgcacttttcaatggagnngacaggaagatcttcgaactgatcaacacttgcacagtggccaaagaagattggaagatcctgaaaatcactcatgaa

SEQ ID NO: 15707 - DNA, 410 bp, Glycine max
  unsure at all n locations
gcttaacattcaattntgagcgtctcgatatatgactagactttatcttacatccgagtaaaaagttattttcgttgtaattggctcagaggttcaacattcaatttcgagcgtctcgctatattacgggactcaatctaacatccgagtaaaaagttattgtcgtttgaattggctcagggcttcaacattcaatttgagcgtctcgatatatgacgagactcaatcagacatccgcgtaanaagttattgtcgtttgaattgtctcaaaggttaaacattcaatttcgagcgtctcgatatgttacgggactcaatcagacatccgagtaaaaagctattgtcgtttgaatttgctcagagattcaacattcaatttcgaacgtctcgatatattatgggactcaatc

SEQ ID NO: 15708 - DNA, 394 bp, Glycine max
  unsure at all n locations
gtggccagtgcagatgacataccaaactgcaattttgcacatgaatcatagataagattaaaaaatcaaaaataaatgtcacatggcaaaatagccatgataacaataataattgttcgttcttctatagactaaaacaccagattccccacatatgagaaaatctatgaaacaccaatacttcaatttgctttgcctatccgtattcgatttgtttacgatactaatactcttaattggatactntacgtatatatagatattgttgaagtattactactaaaaatatgatatttagtaatatttttttatcaacactaaataaaaatgttactaaaagcctttgacgacatttaatttttttacaaaatgatgaataaatgttattaatata

SEQ ID NO: 15709 - DNA, 355 bp, Glycine max
  unsure at all n locations
agctttctcatacatacgaagattttgtgagtntacaaaccatgttgtcattcttgacaagataaccaagaggcatgtccatgtatactccctcaatcaaatcactattgagaaacacattatttaaatcaagctgaaacatgttccaatttctgtgaggtgcaatggaaagaaacactctcattgccgtatgcttggcaacaagtgagaaagtgtccaaaaaatcgatctctgcttgttgtttgatgtgtgtacccttttgcaacaagacgagccttgtatctatcaagggagccatctgctctatacttgaccttataaatccatctgcaactgatgggtcttttatcgggtg

SEQ ID NO: 15710 - DNA, 413 bp, Glycine max
  unsure at all n locations
ttcttgtatgaagaaggagatgaatgaacggagagggagagaagagcacgaaattntgtgctcaaaaagagctctgagatctgaagttaatattcaaatgatcaaagttgagaaaaatgcacacacatgacctctatttatagcctaagtgtcacacaaaattggagggaaattcaaatttcacttgaatttgtggagccaaactttggagccaaaatttaactaattatgattcgtgaatgttagttatggttcagcccactaatccaagatcaattccaagattctccactaagtgtgcttaggtgtcatgaggcatganaagcatgaaggacatgcacagagtgtgactatatgatgtggcaatggngtatagtaagcaaatgctcacctctccctctaaaattaattgg

SEQ ID NO: 15711 - DNA, 398 bp, Glycine max
  unsure at all n locations
tgacaaattccttgngataaaggtagtgttgccatgttttcaaagcccgtactaaggcatacaactccttatcataagttgaatagttaaaggtaagaccacttaacttttcactaaaataagcaattggatgaccttcttgcatcaacacagccccaatcccaacatttgaagcatcacactcaatttaaaaagatttttgaaagtttggcaatgcaagtatgggggcattagttagcttttgcttaagaacattgaaatcttcttcttgtttctctccccattagaaaccaacatttttttagcacttcattgagaggtgctgccaatgtgctaaaatccttcacaaatcgtctataaaatcttgctaaaccatgaaaactcctcacctcggtcac

SEQ ID NO: 15712 - DNA, 434 bp, Glycine max
  unsure at all n locations
agncttgtttttgactcatcttctctttgaagtggcgtctccaatcattcttcttccttatccaatacactgccattgatcttcaagaagaaaatgactccattgatgaagaagatccaaggcctacaagctccacatggagctacgtcatgtggtattaagagcatcttcgtctaggtgatgttcttttgcttcctctatcttttttcccggtcaattcactctaattccttattcttcatcttattctccatgtatatcctccattttcttgtggtttggtactatttagagtagattcacaaaanataaactgattaaatcttagatctacacttgttcttgcatttctattggttcaaatttatagacctattcttgaatcatgnttttgtgttgattntaggttctatcattntcagtcataatctttt

SEQ ID NO: 15713 - DNA, 423 bp, Glycine max
cgatactataaaacccagcttaatagatggtggtctattatgccggaggcatcctattgtttcttaaagttttgggtcgtcttctttgtgggaaagataaggaagtatgggaaagtcagctacacaaacttgaaaacatgccaaatacagatatttaccatgcaatgagattgagttttgatgatctagatcgcaaagaacagaagattcttttagatcttgcatgtttcttcataagattgaatttgaaactggacagcataaaagttttattgaaagacaatgaaagagatgattcagtggttgctgggttagaaaggttgaaagataaagctcttgtaaccatttctgaagataatgctatatctatgcacgatatcatacaagaaatggcttgggagattgtgcgccaagaatcaattg

SEQ ID NO: 15714 - DNA, 388 bp, Glycine max
agctttgatgcattttatggagaggttaatgaaacaacgagatgatgcgctccatgagaggttggatcaaatggagaatagagatcataatgaagaagaaaggaggagaagagggaatgatggtgttcctagacaaaaccgaattgatggtattaaactcaacattcctccatttaaaggaaagaatgatccggaggcctacttggagtgggagatgaaaatagagcatgttttctcatgccacaactatgaggaggaccagaaggtgaagcttgccgccacggagttttccgactatgctcttatgtggtggaacaagctacaaaaggagagagcaagaaatgaagagccaatggttgatacatggacggagatgaaaaagatcatg

SEQ ID NO: 15715 - DNA, 427 bp, Glycine max
  unsure at all n locations
acatgagtttgtggctacttcattcactcctctaatgactatagcatcatttctggcgctaaactgttgggagttggaagtcatcttctcaattaaatntctggcttcagcaggggtcatgtctccaacggctccaccactggcaacatctatcatacttctctccatgttactgagtccttcataaaaatattggagaagaagctgctcataaatctggtggtgagagcaactggcacatagttatttaaatctctcccagtattcatatacactctctccactgagtttcctaattcctgagatatcctttctgatggcagtggtcctggaagctggaaaatttttttctaagaatactctcttgaggtcatcccanctcgtgatggaccttggagcgaggtaatatagccagtcctttgtcact

SEQ ID NO: 15716 - DNA, 353 bp, Glycine max
  unsure at all n locations
tcaccttcagaggactacacgtnctcgccttcagaggactacacgtgctcgccttcaaagggtcatgtaccttcacctttataaggctacacgccgtcaccttcaaaagactacacgtcctcacctttagaggactacacgtcctcgccatcagaagactacatgtcccccattttcaaaagaggacatgccctcacctttagaggattgcatgtcctcgtcatcatangactacactccctcgccttcaaaaggcgacacgtcctgaacttcaaaaggctacacgccctcgcctttagagggctacgcgtnctcactttcagtgggctccatatccacaccttaagataatt

SEQ ID NO: 15717 - DNA, 438 bp, Glycine max
tcttatccaaggctcatcttggtggtgaagcttcttcttctatggcttattccctagtggatggcgcctcctctcacctcttctcctttgtcttccgctgcatttccatggtggaaaatcatcattaaaggacctcattgaagctcaaagatccagcctccatagaagccccacaagcaagcttccatcactgctgttgttggtgctgacggctggaccatctgaggttagggcgattcttgtatccagggttgtatctgttgctggagaggtcataattgttctgctgtggttgattctgcttctgaggttgaggaggactattgcaaatatttgcagcataagcttcaagctgctcaatcactccaagttgctgcatggagggcaaatgtctgtatggtggtcagcacaggagcacaaaccacatacccttgtaca

SEQ ID NO: 15718 - DNA, 363 bp, Glycine max
  unsure at all n locations
tctatgagtccccttgagaattgngtttctcttcttcttcttcttcttatatgggatccctctagcctttgcctgacactccttgacctcacgcaggtacacccaaatggctcctcctacaaaaggattagtctctggcgatccgtcatgctcctcataagcagcgcgaagccggcctatgagggcatcgaggctaccccatgcttgcctgagagggcaggcacacggtgcacgaggggtgggctggccaaagaagatgcaaccgtgcaagtggagcttggtttcccatattgatcgaggaccgaacgaaatccaacacatggttgaagttgcactgagagagtggaactggcggactctgat

SEQ ID NO: 15719 - DNA, 434 bp, Glycine max
  unsure at all n locations
tgcatgccagcctatatcttctaagcaacactctcactctggggagactccaaaacgatgccgttttgggccccactcaagtcaagcctctccaccaagctcctcaacataaccgtctcctctctctgcaaagcgaagcanatccccaatgccgaaacggcaatcgtcgacggcatacgactcggcgtgctccccgacgtggtcacctacaacaccctaatcgatgcgtactgtcgtttcgccacccttgatgtcgcttactccgttctcgcgcgaatgcacgacgccggcattccccctgacgttgtttcattcaataccctaatctccggcgctgtgagaaagtctctgttctcgaagtccctcgacctgttcgacgaaatgctcaaacgaggcatcaaccccgacgcatggagccacaacattctaatgaa

SEQ ID NO: 15720 - DNA, 393 bp, Glycine max
agcttttgtattattcaagaagtgccttatgaatactcccgtgcttatgccaccagtacctggaaggcctctcattttgtacatgacaatcttggacgagtcaatggggtgtatgttggggcaacatgacgaatccggaaagaaagagcgcgctgtttactacctgagtaagaagttcacgacctgtgaaatgaattactcgttgctcgaaagaacgtgttgagctttagtatgggcatcccatcgcctaaggcagtacatgctgagccatactacctggttgatatccaagatggacccggctaagtacatctttgagaatccatctctcacgggacgaatcgcccggcggcaagtcctgctatccgaatttgatatagtcgacgtcacaca

SEQ ID NO: 15721 - DNA, 422 bp, Glycine max
  unsure at all n locations
agcttgtttcttttggtgcatagaatgcaggcaaaaaaaaaaatagtaagtgtcatgaatctatgacataagcttcaaccaattaacattgtttgtatgacaactgttgtagttggacagcaatcacacagtttgtccaccatggaatgctntatgttcctattggttatagttttggtatgctttatgttcctattggttatagctttggtgctggaatgttcaatttggagtccacataaggaggaactctatatggtgctggagtttttgctggagatggtacaagacaagcaagtgaaatggagctggagctcgcagagtatcatggcaagtatatatgaaattagcccatanaagctaggctggattctgtgattaatnatccattaagccctcctagctaggttagcattctagtc

SEQ ID NO: 15722 - DNA, 410 bp, Glycine max
  unsure at all n locations
ttcttattttgtagcagttccagggaccatcgacgaacgggcgatcaatacanaaagaatactcattccatgggaaaggaatgaaaatcacacactttgcctcaactctgctaaagcaattggatgtacagtggtcaacattggcactcatgacttcattgaaagaagggtatgtatgtaagccttctagtttccacccataaaagcagaattattgtgggcatgtacactgcagaaccacaaaatttaagatttaatttaatttataaatgaaatctggtcagatttgattatttctcgatcaaagtaattctcaatcaagttacccctgtttntaaatgattccgaatgctggtaaagtatctctatagcatgctacatatttatacagtcaaagcctttctctattc

SEQ ID NO: 15723 - DNA, 433 bp, Glycine max
  unsure at all n locations
gcatatgtactntaagtgagagagaagatataaattatttgtaataataattaatattacgagtaaataacatatacaaagatgattaatttttacataatcaatcacatattatcatataatgtaaattgattgatagtaataataaaaatataaaattcatattaattatgatttaagttctaaacattatagatgatatgataaaaaaaatgtgtataaaaatgagaaattaagcaataatgagagaaaataaaattgaataatgaaagagagaaagagtgtgaccgtcacagcttccaatagattggtgttgtcgtgcaagtacttgaggacccatgttagaacacttgctgtggtgtcatgtgcagcaaagatgacaccaatgagattatcaacaacttgagaatctgtgtgctgctgatagtacatc

SEQ ID NO: 15724 - DNA, 394 bp, Glycine max
  unsure at all n locations
attcaaatttcaagtctgaagagtcacaactcttcataaactaactgtgtaatcgattaccacatttatgtaatcgattaccactaaggaattttcgaaaataactcccaagaatcacaaccgttcaagaagttcttgaatgaccatcaaaggcctataaataggtgacttgtgatacgaaattcattagagttntttttaataacattgtcttatcctctcaaaaccaaattgtcttatcactctcaaaatattccttggccaagatactttcaaattcaataaggaatcttgatcgatcttcaattgtaatatgcttctcttaaagagagaaaattcttcttcttcttattcacagagatctgtttaagagaccaatggtctcttaagttgt

SEQ ID NO: 15725 - DNA, 396 bp, Glycine max
agctttatttgttttggaatcaaataaagaaccaaaaatagtctcatattggaaaaattgttcatatcgtgtctcaatagaattaattaattgatctaatatgtataaaaaatactcgatacgaacagattcttcacgtgaatgtgtgatctcattactaatattttcatcaaaatgagattttctatgaattttacgtttttcacaaaattttggctctatatccatttcgatagccattttttctgtggattctaaagtcgatgcaaacccgtcttccctataatgttttatataagcgataagaccttttaaatgatctatagcaacatctatatgcatatctttggattgtacaatcctgctaacagaaattgcaacaaacaacatatcata

SEQ ID NO: 15726 - DNA, 337 bp, Glycine max
  unsure at all n locations
cttttcacatgaatgtccgattcgggcgcataatatgtcgagaagctcgaaattgaacaacggaagctcttgagaaattcaaatggtcataacttttcacacggatgtccgattcaggcttataatatatcgatacgctcgaaattaaacatcagaaactctcgcgaaatttaaatggtcataacttttcacacggatgtccaattcgggcgcataatatgtcgagaggctcgaaattgaacaacggaagctctcgtgagattcanatggtcataactcttcacatggatgtgcgattcaggcgcataatatgtcgagaggctcgaaattgaacaac

SEQ ID NO: 15727 - DNA, 395 bp, Glycine max
  unsure at all n locations
tcggacatccggtgnaagttatgaccattagaatttctcaagagcttccgntggtcaatttcgagcgtctcgacatattatgcgcccgaatcggacatccgtgtgaaaagtcatgatcatttgaatntctcgagagtttccgatgtttaatttcgagcgtatcgatatattataagcttgaatcggacatccgtgtgaaaagttatgaccatttgaatgtctcaagagcttccgttgttcaatttcgagcctctcgacatattatgcgcccgaatcggacatccgtgtgaaaagttatgatcatttgaatttctcgagagtttccgatgtttaatttcgagcgtatcgatatattataaccctgaatcgtacctccgtgtgacaagttatgacca

SEQ ID NO: 15728 - DNA, 376 bp, Glycine max
ttatattcatgacgatcgagagatttgtttttttgatgagttatgaattattggatatatcataaaaaaggtgtgagaccatgagagctctaaaataatatctgaatatacttacacgtacattatatatattagttcttttttcattgtcatacattttatattatattatacacggggtttaaactttatgctaaatcaacttctattattaattttacaaatccataaaattggcagaaaagctacgtcatctagttaacgaagttttttatgcttcaaggaatttgaaattcactatatagacaggcctgatcaattgtcattagttatttaatgtcacgtaaacaaattaattaattaaacaaaacgaatg

SEQ ID NO: 15729 - DNA, 411 bp, Glycine max
  unsure at all n locations
agcctatcttttatatgaaacacccccaaaaattctcaaatgtgaaagttttaccttctttcctgaccatacttctttgggaagctgataattcanaggaactgatggtcctctattgatgagatatgttgttgtgtttattgcttctgcccagaatgttttatgcaagccagattggatccacaaacaccccgctctcttgttcaaggttctattcatcctttctacaacaccattttgctcaggtgttcctagtattggcttaataattctgattccatgttctgaacaaaagtccttanaatcctgactatcatactctctgtcattgtcagattttagactnttaacctttagacctgtntgattttcaacttctgttgtccacttttaaacacagaaaacacatca

SEQ ID NO: 15730 - DNA, 325 bp, Glycine max
ctcgatatactataggcctgaattggacatccgtgtgacaagttatgaccatttgaattgatgcagagcttgcgtcgttcaattttgagcatctcgacatatgatcagcctgactcggaccttagtgcgaaaggtatgaccatctgaatcactcaacaacttgcgatgttgattctcgagcgtctctatatgagaatcgcctgaatcagaggtgcgagctaaaagtcatgaccatttaaattgctcaagagcttccggtgtcaatctcaagcggatcggtgtgcgacgcgcatgaatcggagatccgtgtgaatagatatgacca

SEQ ID NO: 15731 - DNA, 280 bp, Glycine max
gaatcggacatccgagtgaaaagtgattatccttttgaatttctcgagagcttctatgtttaattatgagcgtctcgatatattatacgcctgaatcgaacctcagtgtaaaaagtatgaccatttgaattctttagacatacgatgtcattttgagcgttctatatgtgatgaccttatcagacctcctgtgaaaggatgacattgaattctcgagagcttcgttgtcaatttcagcgctcacatttatgccccgatcgacatctgggaaagtatgaca

SEQ ID NO: 15732 - DNA, 382 bp, Glycine max
  unsure at all n locations
ctcggatgttttatttatgcgcataatatatcgagacgctcgaggttgaataatggaagctattgagcaattccaatggtcataactgttaaactcggaagtccgattgaggcacataatatattgacacgctcgacattgaacaacggaagctctcgagatattcaaatggtcataacttttaactcggaagtcngattgagacgcataatatatcgagacgctcgaaattgaacaatggaagctcttgagcaattccaatggtcataacttataactcggatggccgattcaagcgcataatatctcgagacgttcgacattgaacaatggaagctcttgagcaattcaaatgggcataactcttcactcggatgtacga

SEQ ID NO: 15733 - DNA, 324 bp, Glycine max
  unsure at all n locations
acctatacttaacagaaaatacttataacacaaaatgaaaatactaagtatttttgggcctttagggctccataatataggtaaggtaccctagaaatgtaacatttttcagtccttgtattttagggcacctagactagttttttgtattaggggtagttttataatttcacatgcattaagtgaatatttgatgtgtgtggttgtaaataaatntaattgaattgggagaagcccaatccaattataatttagagggggaggtgagcatttgcttgtacaccccattgcacatcatatagcacactttgtgtgtgccttcat

SEQ ID NO: 15734 - DNA, 292 bp, Glycine max
  unsure at all n locations
ctaaaagcttttcacccttatcgacgattgaaaaaagcttttaatggaagtcaggggaatgaangccccccagaaccattaactggaaaccaagttcatgatcgcgtaaaggacattgtaaccgtgtttgggaagtcccagaagaagacatcatctcccaacaacatgtggaagaaacgctcaatattctttgatcttccatactggtctgatctatatgtgcgtcactgtctagatgttatgcatgtggagaaaaatgtgtgtgatagtttaattngtactcttcttaaca

SEQ ID NO: 15735 - DNA, 303 bp, Glycine max
ggctggctattatagaaagatcattgtatgattttctaaattggcattgcccctaactaagttgactcgtaagaatgagaagtctttctggaatgagaagcgtgatcaaagtttccaagagttgaagaggcggttgacgacagctccagtgttaattttgcccgacccttatagaacattcgaagtgtattgctatgcaagcgggcaaagcttgcggtgtgtgttgatgcaagatggaagagtactggcttatgcttctcgtcaattacgtcctcatgaatttaactatccgactcatgactt

SEQ ID NO: 15736 - DNA, 329 bp, Glycine max
agctttgttgtctatgatcaggtcatcacgcgcgcgctcaaggatctcggcggcggctcgggcaaccacgccaggatcgacagcattcccgtgcagatgggcacggccacggccggcagcacgcccttcgagggccggctgcagctgatcgacaaccaggtcgatgcccgaagcggcacggtgcgcgtgcgcgccgtcttcgacaacaaggatggcgccctcatgcccggccagttcgcccgcatccgcatgggccaggcgcgcgacagcagcatgctgctggtcagcgagcgcgccatctgcacggaccaaagcaagaagtacgtgat

SEQ ID NO: 15737 - DNA, 394 bp, Glycine max
  unsure at all n locations
agaagctcatccagagagatgtagccactngctttgttttattaaaagaaaaagcagcaactgaatgatcttctatttcaactttgtttaaatgtaatgttgcagctatgaattctctgtagtcaattgtgccactgttgtcaacatctgcctgcgatcagaattatcttttttttaaaatggaacaaatggattataatttataaggatgtgctactaaaactggttaacactacctttaccattctggattctatttacaatgttacttttccctacttgcataacaatgtgtgactaaatgatactcagaagtctttcccttgtaagactatatctttagaatggaattataaacactacccataatataggtcaagttacaacttgaaca

SEQ ID NO: 15738 - DNA, 363 bp, Glycine max
agcttatatttattatacttacgtcataggattaacagaatagcttatatcacattataaaaaaaaggatgacacactgatgataatttaaaaagttttacaccagcatctaatcccaacccatcttgtatgttaagatagttgattcttatgctaattactttataagttatatcaacaatgatgatataatttaataacggtataaaactattttatatatgaggatcaactcattacattaacaataaaattaccaagagaatcatgtcttattctaatacgaatattttataattgattattagaataaacaaagatttctcttttctcttgcttactaattgaatgtatccttttatt

SEQ ID NO: 15739 - DNA, 427 bp, Glycine max
  unsure at all n locations
ataactttgtactcggatgtcttatttagttccgtagtatatcgagacgctcgaaattgaaacagaagctctgagcatattcaaacgacattaactnntttctcggatgtacgattgtgtcccttagtatatctagacgctcgcaattgaaaacggaagctcgtagcaaattcaaacgacaatacactttaactcagatgtctgactgagtcctgtagtatatcgagacgctcgatattgaaacataaggtctgagcaaattcaaacgactataactttttactcggatgtccgattgagtcccgtaatatatcgagacgctccaaattgaaatagtagcttctagcatattcaaacaacaataactttttactccgatgtccgattgagtcccataatatatcgagacgctccacattgaaaacat

SEQ ID NO: 15740 - DNA, 461 bp, Glycine max
  unsure at all n locations
tacaaacccaagcttgacactatgaaatngaaaacttgaaaccctcaagtttcattctaagttgcaactgacacagtaaccaagattgcatttttttacccccttcttccttctccagcatcatcaaacatcacaacacaaacctcaaatgcctactaccaccaccactttttcttgcttcctcttcaccttcctcatcaccacttccaccatggcttctatggttggagctgtgggggtgaactggggcaccatggcttctcacccacttccaccccacaaggtggtgaagctcttgaagtccaacagcatcaacaaagtcaagctctttgatgccaactctgatgttcttcaggccctttctggctccaacattgctagtactgtgggtgttcccaacactttgctcagaagcttgaactcttctaagaaagctgctgatagctgggtccatgataatg

SEQ ID NO: 15741 - DNA, 382 bp, Glycine max
  unsure at all n locations
agcttctttctatatacaagactgaagctctgataccacttgttagagaagtggcctcagatatcttaagaaggcggggcgcgaatgaagatatgaccaactatttaccctaatcaaaaatctatattactgctcaaccaacgtatgaattcccttaatgacaatcttcttaaatattaattcanatgagacactttgaatatgaatataatgcactcatagataacggagaataacggaagagaatatgcgcactcagttctatactgtttcggccacacccgtgtgcctacgtacagtccccactaaacccgctagagagttccactatcttagaaatgctttgtacaagttctaaacacacaaagacaatccttccttt

SEQ ID NO: 15742 - DNA, 387 bp, Glycine max
aagcacattttatttctttggagaaaccttggtctaaaatgtggcaacataatgttatcaatctaacaaaaaatcctatcatgcattctaggactaaacacatagaaataatgcatcattttcttagagatcatgtgttaaaaggtgactgctacattgagttcatagatagtgagcattaacttgcagacattttcactaaaccacttgctagagataggttctgtttcattagaaatgaaataagcatattagatgcttccaacataaaataacttcctatttgcataatgtgtgatgcacattgctatttgagacgatgactaatttattctggagtctctactctaatcaattaccaagtagtttaatcgattacttctctct

SEQ ID NO: 15743 - DNA, 164 bp, Glycine max
gtatcctatgtcgtgtggatgattctccagattacctgggtaactttatagagagaaatcgaaacctctgaatatcaaagagttgagtctaaacttcaagagagaaaactgtgtatcaagagaataggagtgccatggcagaaatttgaaacagcaggtcactg

SEQ ID NO: 15744 - DNA, 333 bp, Glycine max
  unsure at all n locations
tttctcatgtgttcactttacccaatctccgggttcgaagacaaccttctttcttcctttgttggcttgtttagcatagcttttatttttcctctcaatttgatctttgactcttacatgaagcttcttcacatagtccgcctttgcttgaccttctttatgcttaaaaacagaaacattangcataggcaaaagatcaagaggagttagtgggttagaaccataaacaacttcaaaatcatcaaaagtggtagtggtcaaaatctgatttttgcaaaacaagatatatagtgactgtttagcatgaaacaacctcttgacctcactttttgt

SEQ ID NO: 15745 - DNA, 189 bp, Glycine max
  unsure at all n locations
gtcacacgaagtccgattcaggtgcataatataccgagacgctcgaaattgaacaacggaagctctcgagaaattcaaatggtcataacttatcacacggaagtccgattcaggagcataatatatcgagaagcttgaaattgaacaacagaagctctcgagaaattcanatggtcataacttgtcaca

SEQ ID NO: 15746 - DNA, 275 bp, Glycine max
  unsure at all n locations
taagaaccccatcgtcttcttcgatgtcaccatcggtaacattcccgccggtcgaatcaagatggaactctntgccgatattgccccaaaaaccgccgagaatttcaggtatctatgcttctagtgttaaagcgtttcttcttttagtgctagttagagtgccccttggctttaagcattgctatcaacttgtgattgaacttctacgaaaaatcactanttnttgttttagtctacagaagtttactcattttaattgcaaaagtgcagattta

SEQ ID NO: 15747 - DNA, 350 bp, Glycine max
agatgtatcacacaatcaaataaaggggctactcccagattgttggagaccctaaaacacttacttgttcttgatttaagcagcaataaattgtcaaggaagattcctatgtccatgggcgcccttgttaatatggaagccttggtttttaaaaacaatggtttaatgggtgagttgccttcttctttgaagaattgcagcacgttatttatgctggacctgagtgaaaatattgtagcccggccaataccatcattgataggacaacgtctgcagcaattgataatctttgacatgcgaggaaatcacctttcatgatatatacccattcatctttgtatttgaaccga

SEQ ID NO: 15748 - DNA, 251 bp, Glycine max
tctgtacctgtcgcaagggtctgtggtttgagctcctctgtggaccaccatacagacctttgcgcttccatgcagcaagctagagcaattgatcggcctgaagcttatgctgcagatatatacgatagacctcctcacctgggagcaaataaaccacagcatgacaattatgacctctgcagcggcagatataaccctggatggaagagatagcctaaccttacatggttcatccctcaacaacaacaaca

SEQ ID NO: 15749 - DNA, 374 bp, Glycine max
  unsure at all n locations
ccaaagcacagcttcaaatttgggcactttagatgtatcacacaatcaaataaaggggcaactcccagattgttggaaatcagtaaagcaattactgtttcttgatttaagcagcaataaattgtcagggaagattcctatgtccatgggcgcccttgttaatatggaagccttggttttaagaaacaatggtttaatgggtgagttgccttcttctttgaagaatgcagcagtttatttatgctggacctgagtgaaaatatgttgtcnggtccaataccatcatggattggacanagtatgcagcaattgataatcttgaacatgcgaggaaatcacctctcangatatctacccattcatctcntgtattt

SEQ ID NO: 15750 - DNA, 361 bp, Glycine max
  unsure at all n locations
ctcctctaatgactatggcatcatttctggcgctaaactgttgggagttggaagccatcttctcaattaaatntctggcttcagcaggagtcatgtctccaaaggctccaccactggcaacatctatcatacttctctccatattactgagtccttcataaaaatattggagaagaggctattctgaaatctgatggtgggggcaactggcacataatttcttaaatctctcccagtactcatacaggctctctccactgagttgtctaatacctgagatatccttcccgatggttgtggtccctgaagcaagaaattttttttctaagaatactctcttaaggtcattccaactcgtgat

SEQ ID NO: 15751 - DNA, 267 bp, Glycine max
ctccatgagaggcgggatcacatggagaatatatatcataatgaagaagaaaggaggagaagagggaatgatcgtgttcctatacaaaaccgaattgatggtattaaactcaacattcctccatttataggaaagaatgatccggaggcctacttggagtgtgagatgaaaatagagcatgtcttctcatgcaacaactatgatgaggaccacaatgtgaagcttgccgccacggagatttcccactatactcttgtgtggggaaca

SEQ ID NO: 15752 - DNA, 411 bp, Glycine max
  unsure at all n locations
atcttcttcatcaatggagtccgttgctttttgtatatcaatgacagtggaatgcagaaggaggaaaggtgattggagatgccacttcaaggagaagagagtcaagaacaagttcaccaccataggaagccatggataagagcttgaaggttggagaagatgagtggagggagagggagagaatgggcacgaaatttatgcctcgaatgaggtctaaaatttgaagtgtaatttctcanatgatcaaagtagaaataatgcacacaacaggcctctatttatagcctaagtgtcacatgaaattggagggaaatttgaattttattcaaatttcacttgaatttaaatttgtggagctaaatttggagcctaaagttcactaattatgaatagtgaaatttanctatggtt

SEQ ID NO: 15753 - DNA, 288 bp, Glycine max
agatggaccatttcaagtgcttgaaagaattatgacaattcttacaaagtaagctacccggtgagtataatgttagttccacctttcatgtctctaacttatctctttttgatgcagatggagaatccgatttgggaccaatccttctcaagagggagagaatgatgacgaaatgaccaagagcaagggcaaggatccacttgaaagacttggacgacctatgacaagggttagagcaaggaaagccaaggaagctcttcaacaagtgttggccatactatttgaata

SEQ ID NO: 15754 - DNA, 392 bp, Glycine max
  unsure at all n locations
agcttagtcttgttcaacctaccatccttagactgatggccaaactgaatggaccattcagttgttggaggatcttttgagagcgtgtgtcttagagcaaaagggaagttgggagagttttctgccattgatagagttcacttataacaatagttttcactctacgattggcatggctccctatgaagctctgtatggtagaaggtgtaggacacctgtcataccctaatttcgttcggggaccagctgtttgttgggatgcgaccctcgtttgaccacttcgaggtacttggcacccatcgttaggcaattcgtgaagttctgtgacatgccggaagtcaaaagatagcatntgtgcacaattcgtgaagttccgtgatgtgccggaagtc

SEQ ID NO: 15755 - DNA, 397 bp, Glycine max
  unsure at all n locations
agctngtgtgttatttgtgtttgcaagtaaatgatgaatgagcgagcgcatagcacaatgaatntaagatgaaacgacgtagttggcagtgaggcaggaggagtttatggttttagcattgttgttcttgagttgtgttgaatctggagagagagatgaataattgtatagcaaagagacgtgagaatgcgaggagcagtagagaggaagatcaactgatagtgactccattaggcgctggaaatgaagttgagtcttgttcgattgtggaatacacccggcttactctggcatggctgctttgccctatttcgacgagattgacccttccatagtcaatgttcttctcatcactcactttcacttggatcatgctgcttccttgccctattttctc

SEQ ID NO: 15756 - DNA, 354 bp, Glycine max
  unsure at all n locations
agctnagattcttctattacttccatacatnggctntgaacaccatgaggaaattcgcacaanacactgaattggtgagacacaaagttacaagatttgctaccactttcttaactntgcaaagattgcataagcaaaaggccaatcttagaaggatgtttacttcggatgaatggttgaagtctaaggaagctaaagagtctaaggggaagcaagcaacaaatgttgttcttatgccatcattttggaatgatgttgtctacattttaaaggctatanggcctcttgtaagtgtgttgaggttggtggaataatgaaaaaacctgcaatgggtttcatttatgaagcaatgga

SEQ ID NO: 15757 - DNA, 388 bp, Glycine max
  unsure at all n locations
agcttcgttgattgttcgggactgcgngagcaagcacctctactcctccgccatcttcttcgccgacaaagtggcagccttcaccgccgaccccgcagacatctacatgcaggcccaggccctcttcctcggccgccactaccgtcgcgccttccacctgctcaacgcatccaaaatcgtcctcaccgacctccgattccgctacctcgccgccaagtgcctcgtattcttctggttccttctctcttttttcatttgattattgattaaaaccattcattgaaaatacacatcaattctaataatgggatgtctttttctatttttatttanacgagttgaaacgtgattcttgaatgaattcagatagtatgagttacaacttata

SEQ ID NO: 15758 - DNA, 362 bp, Glycine max
  unsure at all n locations
agcttctctaatattatgcgcctgaatcagacttccgtttcaaaagttatgaccatatgaatttctccactgtattccgtgtgacaagttatgaccatttgaatttctcgatagcattcgttgttcaatttcgagcgtctcgatatattatgcgcctgaatcggacttccgtgtgacaagttatgaccatttngaattgtcgagagcatccgttgttaaatttcgagtatctcgatatattatgcgcctgaatcggacatccgtgtgacaagttatggccatatgaatttctcgagagcattcgttgttcaatttcgagcgtctcgatatattctgcgccttaatcggacttccgggcgaca

SEQ ID NO: 15759 - DNA, 421 bp, Glycine max
  unsure at all n locations
agcttcatgtgttatggcctcagcaaacttcttatttccagaaggaaattcaatcaatagacctccaatctttaatggagagggttaccagtactggaaaacccgaatgcaaattttcattgaggcaatagacttaaacatttgggaagccatagaaataggaccttatatacccaccacagtagaaagaaccataatagattgaagcacaacaagtggaagcacaacaatagaataaactagagatagatggtctaaagaagatagaagacgagtacaatataatttaaaagccaaaaacataattacatctgccctgngaatggatgaatattntanggtttcaaattgtaagagtgctaaggaaatgtgggacactctacaagtaacacatgaaggcacaacatatgttaaaagatct

SEQ ID NO: 15760 - DNA, 297 bp, Glycine max
agctatttatcatttcaaatggtcataacgtttcactcggatgtcggattcaagcgcataatatatcgagacgctcgaaattgaataatggaagctattgagcaattccaatggtcataacttttaactcggaagtccgattgaggcacataatatattgagacgctcgaaatcgaacaacggaagctctccagaaattcaaatggtcataactatgaactcggaggtcggactgagactcatattatattgtgacgctcgaaattgaacaatggatgctcttgagcacattccaat

SEQ ID NO: 15761 - DNA, 302 bp, Glycine max
agtctttttcttagggagacggaccatctcaagtgctcgaaagaatcaatgacaatgcttacaaagatgagctgcccggtgagtataatgtgagtttcaccttcaatgtctctgatatatctctttttgatgcatatggagaagacgattagaggacaaatccttctcaatagggacagaatgatgatgacatgatcaagagccatggcacagatccacttgaatgacttggagagcctatgacaacggctagagcaaggatagccaatgaagctgttcacgaatgttgacatactatttga

SEQ ID NO: 15762 - DNA, 312 bp, Glycine max
agcttcttatgttttagttgataaagatgaattcttggctacttcatgcactcctctaatgacaatagcatcgtttctggcactaaattgctgggagtttgaagccatcttctcaattaaatttctggcttcagcaggggtcatgtctccaagtgctccaccactagcagcatctatcatacttctctccatgttactgagtccttcataaaaatattggagaagaagctactcagaaatctgggggtgagggcaactggcacatagttttttaaatctctcccagtattcatataggttctctccactgag

SEQ ID NO: 15763 - DNA, 341 bp, Glycine max
  unsure at all n locations
ctgcatactcatcccttatcacaagattgccaaaatccaataactctgccactggattatgtgcttcttttggacaatttgtggaccacacaaccgtgttgttgtgtgtaaggaccaaattgccagaactgtttagtctcaagatggcagaggaatcatttattgggttgccaccgtttgcaacccaaacaacattttgtgacggattattcttgaaccaaatccccaggtagcttttgtttggaagtccaagattgaagaaaccaagctcanagattcccctttgggaaaccatggtctttccaaaactganggattgggactgtgaaatggatgatgtg

SEQ ID NO: 15764 - DNA, 421 bp, Glycine max
  unsure at all n locations
agcgantatttcttgcnttctatggcggngagccngngcttgactcatcttctacttgaagtggcatctccaatcacctttcctccttctncattttgtttccattgatcttcaagaaacaaaggactccattgatgaagaagatccaaggcctaccagctcaacatggagctacatcatgtggtatcagagcatcttcatctaggtgatgatcttttgcttcctctatctntntgcttggtcaattcactataattccttggtcttcatcttcttctccatgtatctcctccattgcttgtggcttggctctgtntagagtagattcaaaaaaaaataaaccgattcaatcttagatctacacttgctcttgcatttctatggttcacatntaatagatctactcttgaatcatgtttta

SEQ ID NO: 15765 - DNA, 417 bp, Glycine max
agctttacttcatatgttttccaaatcatcaagaatcttgttgaaaacagccaattgttaagtggctgttcttgactctgtcatcttgaaggtgtacagtttttgcttcaagcatagccgatttgcaagggactttgtcatatacaatgactccagtttcaaccacattgaggctgctgtcttttctcttgcaacttctcttaaagctttatctccaaggtatataatgattgcacttctggctttagcaatcatctctgatttctcctttgagcttagagattcagacatcttttcttctcctttaagagcttctgcacaaccatgatgaatcaagattgcttccatcttgattctcataacccacagtcattttccctgaaaacttctctatatcgtactttgttgttccatctt

SEQ ID NO: 15766 - DNA, 400 bp, Glycine max
  unsure at all n locations
agcttattttaaggcatgtgaagtgggtggaattcctagagcaattcccttatgttatcaaacataaaaagggaaaaggtaatattgtagccgatgctctttctcggcgtcatgcattactttctatgcttgaaacaaaattgattggtcttgaatgtttgaaaagcatgtatgaaaatgatgaaacttttggagaaatttttaaaaattgtgaaaaattttcagaaaatggtttctttagacatgaaggctttcttttcaaagaaaacaaattgtgtgtgcctaaatgttctactagaaatttgcttgtttgtgaagcacatgaaggaggtttaatggggcattntggggtccaaaagactctagaaacattacaagaacatttttatnggcctcatat

SEQ ID NO: 15767 - DNA, 413 bp, Glycine max
  unsure at all n locations
agcttagttctatatgggatgaaccttttcaggttttggagaggatcaataacaatgcctataggttggacctcccagaagagtatggagtcaggaccacttttaacatttctgatttaactccttttgcaggtggagctgatattgaggaagaggaactaacagatttgaggtcaaatcctcttcaaggggaaggggatgatggaatcctccctaggaagggaccaatcactagaacaatgagcaagaggctccaagaagattgggctagagctgttgaagaaggccctanggttctcatgaaccttangatagaattctgagcccatgggccaaggttgggtccaattatctttgtacatattagactangatgtcattatanttggtccttgtatatagggctccatatt

SEQ ID NO: 15768 - DNA, 428 bp, Glycine max
  unsure at all n locations
agctntaattgctttcatgtcatctgtaacctttacaagttcaacagttggcttctccctcacaataggcaagagagcaccctggacttgtgttgcatttgcaagctcctcgggagtagaatcaccagcctacaataaaacaacagtttcacatgacacacaaacatctttcatttcgaccttcatcagaaatgaaaatgcctaccacaatcaaaatagataatggaacatctgaattaccttaaccttgtgtgcccgtcttgggaacacaaccaatttggccttgtatgttttcagcctctgcacattagcttgcagactttccaaagaacggttcttgcgacgatgatcaacagcaatacctatggttggtgcaagctttttgggaatccctgctgcctatggcataatatanaaaatacataata

SEQ ID NO: 15769 - DNA, 365 bp, Glycine max
  unsure at all n locations
ggcttgctatcttggttataaaagaaaccgtctgtgagtcatatgagaatttttggttgtacaacatatgcattagttgatttaaggactaagctggatgataaatttgtcaaatgtgtatttattggctatgctacttagtcaaaggcatacagactgtataacccactaactggcaagataattgtcaatagaaatgttgtatttgatgaagatgcacgctgggtttgggaggaatgtgaaatcagtaaaagtgtttatcagaaatcagtcagttntgatggttcataggaggtctcaaatgtgccagaaaatgatcacactccaagccctcattcaacgccatcaagccagggatcattaac

SEQ ID NO: 15770 - DNA, 391 bp, Glycine max
  unsure at all n locations
agcttgagttatgatttgaatagagatcatcactaccaacaatgccttgaagtaagacttcattggttgcctgtgatttaactgtgcaaaagtgaggaaagaattcagagtaaactccattatctttggcaaatttacttacacttgatggatttttagtgattgagggagcatgtaacaagtaatgaagataaagaggaaaactaggattagtaggggacttataagaaggagaaccagaaccaagaatttttaaaccttcaccattaccaatataaatctgatctcatccatcanagtgaccaagctgatgaatattntgtggttctccagtcacatggaatgaagctcccgagtcanggatccaggttgaattagcattgtccatgag

SEQ ID NO: 15771 - DNA, 416 bp, Glycine max
ttcttggttatctccttctttactacatcaagaatcaccgggttgagtcttctctgtggttgtcttactggtttagctccatcctctaaatttattcgatgcatacatgtggatgggctaataccaggaatgtccgccagggtccagcctatagccttcttatgcttcttgagaattgacaacaacttctcctcttgttcatcagcaagggaggcagatataatcactggaaaactcttgctatcatccaagtaagcgtattttaaatttgatggcagaggcttcaattctggtgtggtccgctggacagtggtagaaggagatggtttctcagcctttacctcataaagaaagtcagaggtatgtgtacttcctgaaacatggttagtcctatctgactctataaaaacaatctc

SEQ ID NO: 15772 - DNA, 324 bp, Glycine max
  unsure at all n locations
agcttttctactattgccactctactcaggaattcgtgagggatatgttgacgaggaacaccactgcttcctccaggagaatgttgttgtggaaagcaactacagtgctgtaatacagacaattcttccgccaacacgtaatgaccctggaagtgttactattccttgttcaatcagagaagtcactgtgggaaaggatcacattgatttgggagcagtatcaacctaataccactctctatgtgtataatgttgtgagagcttggaatcatgcccacgagaatgactntacaacttgctgaccgatccatctcaagaccttac

SEQ ID NO: 15773 - DNA, 375 bp, Glycine max
agcttgaatgttctataagatgagtggagaacaaaaactacccctaatacaaaaactagtctacgtgccctaaaatacaagggctgaagatcttacattacaagggtatcctaaacttgtggggtaccctccctacattatggagcactaaatacaaggcccaaaaaaataatgaaaccctaatctaatatatacaaagataagtgggatcatacttagcccataagcccaaaatctatcctaacgctcatgagaaccctatggtcttctcctgcatctctagcccaatcttcttggagtcttctattcaatgcccttggagggtaggatagcatcattaggggtgcctaaaagcaagatattcactatggtact

SEQ ID NO: 15774 - DNA, 434 bp, Glycine max
  unsure at all n locations
agctttattattatagaatatccaaggagaatacctggatctgacttatcatcaaattttcctaagttatcttttccattattcaatacaaaacatttacaaccaaagatataaagatgtgagatgtttggttttctgccattgaacaattcatatggagttntctttaaaatgggtcttattaaagccctatttaaaatgtagcatgcagtgttaacggcttcagcccaaaagtattttggaagaggagtatcatttaataaagttctagcaatctcttccaaagatctatttttcctttctacaacacccatttgttgagggtttcttagtgcagaaaagttatgctcaatcccatgcttatcacaaaataattcaaattctttattttcaaactcacccccatgatcgctcctaatagatataatctttag

SEQ ID NO: 15775 - DNA, 389 bp, Glycine max
  unsure at all n locations
agctnttatattatgtngacctcgagtgtatatgggttgtcttccatgtttcaatcgtacgtagcttgtgtcttcttcacagatagggcatgcacgatggcccttaacactgcatccactcaaattcttgtatgctgganagtcattaatggtagaaaataacattgcacacaatgtgaatgtctcatttcgatacccatcaaacacaacaacttccttgtcctacaactctgtcaagggttcaatcaaaggactgagataaacatcatagacaacatcaattatttttacttcatgcactaccaaggaggtaagttgtaaattactagcanaacaagtcacaaactatgctgagttcttanatngtcatagggattcattccatcact

SEQ ID NO: 15776 - DNA, 392 bp, Glycine max
  unsure at all n locations
agcttgttattgtttcacgaaagctctcgagaaattcagatggtcataactnttcatacggaagtctgattcaggtgcataatatatcgagaagctcgaaattgaagcacggaagctctcgagaaattgaaatgatcataacttatgacacggaagtccaattcaggcgcataatatatcaagacgctcgaaattgcacaacggaagctctccagaaattcaaattgtcataactcttcaaacggaagtcagattaaggtgcataatatatcgagaagcttgaaattgaacaacgtaagctctcaagatattcaaatggtcataactgttcacaacggagtccgattctgacgcataatataccgagacgctcgaaattgaacaacggaagc

SEQ ID NO: 15777 - DNA, 331 bp, Glycine max
  unsure at all n locations
caaacgtctcgatatattatgcgcccgaatcggacatccgtgtgaaaaattatgaccaatagaatttctagagagcttccgttgttcattctgtagagcctctatattgtatgcgcttgtatcggacatctgagttaaaagttatgaccatttgaatttctcaacagcttccgttgccaaattntgagcatctcgatatgtgattcgcatgaatcagacatccatgtgaaaaggtatgaccatctgaatttctcaagagcttccgttgttcaattatgagcgtcacgatatgtgattcgcccgaatcggacagtcgtggtgaaagttatga

SEQ ID NO: 15778 - DNA, 416 bp, Glycine max
  unsure at all n locations
cgatatattatgcaccttaatcggactaccgtgtgttatgtttgaccattntaatttctcaagagctggcgttgttcaattccgagcttctcgatatattatgcacctgaatcagacttccgtttgaaaagttttgaccatttgaatctctcgagagcttccgttgttctatttcgagggtctcgatatattatgcgcctgaatcggacttccgtgtgataagttatgaccatttgaatctctcgagagcttccgttatgcaatttcaagcttctggatctattatgcacccgaatcagacttccatttgaaaagttatgaccatgtgaatctctcgagagctttcgtcgttcaattttgagcgtctcggtatattatgcgcctgaatcggacttccgtgtgacaagtactgacca

SEQ ID NO: 15779 - DNA, 435 bp, Glycine max
  unsure at all n locations
gttggaggaatcaaatcctggaggctgctgcatgtagacttcttcttgtagaatgccatggagaaagacattgttcacatccagctgctgtatgggccagtgataggtgacagccaaagtgagaagaagtctaacagtaataggcttaataactggtgaataagtttcttgaaatctgtgtcatattgcttgagggcaaggttgattgaggctgtgatttanatgaagaggaagagggaaagaggtcatanggaaatctggactcattgaacaccacatccttagatatgtagattctgccttcagaagaaagacattagtagcctttgtgcgtaggagaatatcccagaaaatgcattcttgagactgaattggagtttattcttcttgtangagaggaanacaactaggaagtctattaattaaatagacact

SEQ ID NO: 15780 - DNA, 450 bp, Glycine max
  unsure at all n locations
caattgcttcagattgttgcacagaagggcaattgtttgtgctgtggtcgacagaggagcataaaccatagagtctggcgacaggtgcaaatttttgattcatggccagttgggttaccaggttaaccaaggcatctattttaccttcaagcttcttagtctcggctgatgaagatgaattcgtggctacttcatgcaatcctctaatgacaatagcatcacttctggccgtggtcctggaagcaaggaaatttttttctaagaatactctcttgaggtcatcccanctcgtgatagaccgtggagcaaggtaataaagccagtcctttgccactccctctaaagaatgaggaaaagcctttagaaatatgtgatcctcctgcacatctaggggtttcatggtggagcagacaatatggaattctttcagatgtttgtatgggtcttcac

SEQ ID NO: 15781 - DNA, 451 bp, Glycine max
  unsure at all n locations
tcttagtctcggctgatgaagatgaatngttgtgcttcttcattcactcctctaatgacaatagcatcacttctggcactaaattgctgggagtttgaagccatcttctcaattaaatctctggcttcagcaggggtcatgtctccaagggctccaccactagcagcatctatcatacttctctccatgttactgagtccttcatagaaatattggaggacaagctgctcataaatctggtggtgacgacaactggcacataatatcttgaatctttcccagtactcatactagctttctccaccaagttgtctgatgcctgaaatgtcttttctgatggcagtggtcctagatgcaaggaagaatttctccaagaacacccttctaaggtcatcccagttgaaaatagacctgtgagcaaggtagtatagccaatctcttgccactccct

SEQ ID NO: 15782 - DNA, 453 bp, Glycine max
  unsure at all n locations
agcttattctttcttgtacgtgaatttcaaccatggaccatatgtatatatatagatgagagatcccgagttcaactcttccattaataaagaattaacaattaacaattaataactagcatttgttgataaatatatgtctcaatctaccattccaccacctatatggaagcacattgtgtcattgtgtgtatgttttaaggtgaagctatataaagttatatgatattacatcatttatattataattgaaaaaatttatactattttttaaatgagaaataaattctcttaaaaaatgaaaactaaatataaattatcgtatgagatttttcttctataaatagtggattggtattacttatattttgaaacanatattcagaataacaaacaacttctacaaatcaatgtttttcataccttaagcangcatanataattgaacacact

SEQ ID NO: 15783 - DNA, 447 bp, Glycine max
aactataaaactcaagctgggcccttaattgaataagtcacgccagaatccagattgtctgtttaataggggtcccagtcagaaaccatactccaagggaaactgtggagtttgcataccatatccagaaaagggacaacaatcttgtgggcagtgtatttagggggtaacacaccaaagtgggctctttataatagcgatctacaaccaccagaatagccgtgaaatcgttggaagggggtaagccgatgatgaagtccacgctgaggtcttcccatattgacgacaaaatgggaagaggttgcaaaagacccgtgggcttcttggactcgtatttagtttgttggagagtggaacactgagcaagatattggcgaacgaccgaatgaatttgtggccataagaaattggcctatagatgatgaagtgtcatggcgacacccatgt

SEQ ID NO: 15784 - DNA, 463 bp, Glycine max
ctcagcttcccttcaactcttcaaagctctctgagcctcttctcttctcttgaacccatccttcttggtaagttcagtcaatgggttagctatcttgccataatgtttgatgaattttctgtagtagccagttaaccctaagaaccccctcactcccttcacattcattggggttggccattgaatcacactttcaatcttgctaggatccactgctacaccagcttgggatatgacatggcccaagtattcaatggtgtgttgagcaaaatgacacttctttttgttggctactaacccatgtactgctaacagttgcaaaacagtttgcaaatgctccaaatgggcttcccaatcaacactataaactagtatatcatcaaagaaaactaatacgcatttcctaagcaaggggttaaagacatcattcatgaggctctgaaatgtcgagggtgcattcatt

SEQ ID NO: 15785 - DNA, 408 bp, Glycine max
agctttattatgtttagagagagagagacattaccatgcttgtgtcacattgtagttatgcttaatgttatattactatgtttatgtcatattgtacacttaatattatataatttttcaaataaacatgtgcttaatgtgtgtgtgacatatatgggcgtaatatcaactgatgcaatcctagcccccaagggcattggatagaagactccaagaagattgggccagagatgcaggagaaggcccaagggttttcaagggccttatgatagatatggggcccttgggctcagtagatcttgggcccatttcatgctccttctctccttctacctccactcatgttcttctaccttcaagctcttatccatggcttactatggtggtgagcttgttcttgaatcatct

SEQ ID NO: 15786 - DNA, 446 bp, Glycine max
  unsure at all n locations
atcaaccagcttcacaagcctgccttaaaatgtttcctgcctntttttttacttgtatccctagctataactctaaggctagtgaaatttatttcaaagaggcatgtagtgcattaaatgcactgtagactttggatggacacaacaattttccccttccagccagaggggaatatcctcaatttctcataggcaatccatatcgattagctcgacacaaagttgaagcttttctcgtgctacaactttactcatcatattcgtaggatttttatcaatgtgaatcttttccaacttgaagtgttgttcttccacttctcgttgcaacaaatggtatcttacatcaatgtgatttgtgagagagtggtacatcacattcttacttaaatccaaagcactttgactntcataatgaatcatgtaactntcctgcttcattcccaact

SEQ ID NO: 15787 - DNA, 428 bp, Glycine max
tctttccttcctaagatggttctctttcccagtccccctcattaagaactagctcctttcttcctctattgcccttagttgaatacacctttgtttggttctctatttgggtcttaaccctctcatgcaacttctttacaaactctgacctagattccccttctttatgtataaaagaagtgtcaagcgggaggggaatgaggtctaagggtgttaagggattgaacccatagacaacctcaaaaggggatcgcttggtggttctatgaacccccctattgtatgcaaattctacatgagcaagatactcatcccaagacttatggttgccttttagaagagcccttagaagagtggataaagacctattcactacctctgtttgcccatcagtttggggatgacaagtggtggagaaaagaagctta

SEQ ID NO: 15788 - DNA, 418 bp, Glycine max
  unsure at all n locations
gatgattctctacattaatgtataatgttttatattatcgagactcatcatgcaaaagtgtaaatcgtcaaatttttaatttcaattatgacatcattaaggttaatatataatactttaactgatattattaaaacattcattcaataattaacatgtaatcaattaatatttatccaatatatccaatgtcggtgctaatagtaatacttaacatattatttcgagcgaattttgtataattatcatcatcgttattgaatcagatcatctaacatacaatgattcaacatcttaaaaataaagagattcattgcattcattactacattcgattcattatatgagcacattcactatccttgatcgncactatgagtacaaaattatcagcgtatacattttcattattttgaat

SEQ ID NO: 15789 - DNA, 422 bp, Glycine max
  unsure at all n locations
tgatgagggtgttccatatgttctcaagactggactaatagattttctgcccaagttcatggtcttgcangtgaagatcctcataagcatctttaaggagtccatattatnntgtccaccatgaagccttctgatgtccaagaagatcatatctntctaaaggcttttcctcattctttggagggagtggcaaaagattggctatactaccttgctcccaggtccattntcagttgggatgaccttaagagggtgttcttggagaaattaatccctacatctangtccactgccatcagaaaagacatttcaggcatcangaaacttagtggagagagctngtatgagtactgngaaagattcaagaaaatgtgtgcaagttgtccccaccaccagatttctgagcaactccttcttcaata

SEQ ID NO: 15790 - DNA, 367 bp, Glycine max
tctgcatctgtacctgttactgttgcaagagtctgtggtctatgttcttctgctaatcaccatatagatctttgtccttctttgcagcaatctggagtcaatgagcaacctgaagcctatgctacaaacatttataatagatcccctcagcagcaaaatcaacaacagtagaataattatgatctttcaagcaacagatacaatccaggttggaggaatcatccaaatctaagatgggaaaatcctccacaacaacaacagcctgtccctcctttccagaatgttgttggtccaagcaagccatatgttccttctccaatggcagcagcacaacaaagacaacaagcaactgaggcccattctcaac

SEQ ID NO: 15791 - DNA, 432 bp, Glycine max
  unsure at all n locations
tagactcacccccggcttctttttggtgtgatgattccaacttgaagagcttggtcacctcctttttcaccacatctagaatgatggggtcaagtcgtcgttgtggctgcctcactgactgagctccatcctctaaaagtatcctatgcatgcaggtagatgggctaatactatgaatgtttgctaaagtccatccaatagctttattgtgcttctggagcactaacaacaactactcctcttgctcggcagtaagggaggcagagatgaacactggatatttttccttgccctccaagtaagcatacttgaggtttgctgagtagggcttcaactctgatgcgggtggtggatgaatagcgggaggaaccagtgtgagagaacaagatganggttcctcagcctgtacctcataaagcatgtcataagtat

SEQ ID NO: 15792 - DNA, 409 bp, Glycine max
  unsure at all n locations
caagctatgttgtatattntacaatagacctcctcaacctaagcagcataatcaaccacagcagagctattatgacctttccagcaacagatacaaccctggatggaggaatcaccctaacctcagatggtccagccctcagcaacaacaacaacagcctgctccttacttccgaaatgctgctggcccaagcagaccatacattcctccaccaatccaacaacagcaacaaccccagaaacaaacaacagttgaggcccctccacaaccttctctcgaagaacttgtgaggcaaatgactatgcagaacatgcagtttcagcaagagaccagagcctncattcatagcgtaaccaatcagatgggacaattagctacccaattgaatcaacaacagtcccagaattct

SEQ ID NO: 15793 - DNA, 356 bp, Glycine max
gttatgattatttgaatttctcgagagcttcctatgtttaattttgagcgtctcgatatattatacgcctgaatcgaacctcagtgtaaaaagttatgaccatttgaatttctttagagcatccgttgttcattttcgagcgtctctatatgtgatgaaccttaatcggacctccgtgtgaaaagttatgaccatttgaatttctcgagagcttccgttgttcaatttcgagcgtctcgacatattatgcgcccgaatcggacatccgtgggaaaagctatgaccatttgaatttctcgagagcttccgttgttcaatttcgagcgtctggacatattatgcgcccgaatcggaca

SEQ ID NO: 15794 - DNA, 459 bp, Glycine max
  unsure at all n locations
tcattcaattgaataaagagagctgttntgctacatctattagtatcaatttagagttgttgcgcttgtttaattgggtgtgcctctctctttcatttagttattgttttttaatcacctcattcatcattgaccggtacagaaagtccttgtgcagattgttttttcccatgaaagcatttttttagttcatattattataacatgttgttgactttgaattgaagtaagtaattggaaaagtgattactcccaacggttgtaatatcttttacgttaaactatctacttggtatgtaatgttctctattttaagtttttttgctatatcattgtcatcaaatatctatcaatgttatttattattaatttttgttagaaaacttaatcagtcacctttaatggaattatttcttttcattcacatttttgtttattcacaaaattcatacttattta

SEQ ID NO: 15795 - DNA, 405 bp, Glycine max
  unsure at all n locations
ctcttctaaggacaatagcatcatttctgcactgaattgttggagtnggaagccatcttctcaatcanattcctagcctcagcaggggtcatatcaccaagagctccaccattggcagcatcaatcatactcctctccatgttgctaagtccctcatagaaatattgaagaaggagttgctcaaaaatctggtggtgagggcagctngcacacaatttcttgaatctttcccaatactcatataagctctctccactaagttgcctgatgcctgaaatgtattntctgatggaaatggtcctagatgcanggaagaatttctcaagaacaccctcttaaggtcatccctgctgaanatggacctgngagcaaggtagtacagccaatcttttgccactccctcta

SEQ ID NO: 15796 - DNA, 432 bp, Glycine max
actcagctcagcacttctgtaggttcaggcttccatctctctgatatatctgccatatactcagccggtattaggcctcatgagctttctcatatccagcttactggatttagtttgggtgacttcccttttagatacttaggtgttccccttttatcatcgagattaaatgtatgtcattatgctcccttgctttccaagattactggcctgatttagggatggagcaagaagtctttatcttatgcaggtaagttagagttgattagagcagttattcaaggaattgtgaatttctggatggagatttttcctttgccgcaatctgttctggaccgaatcaacgcttcgtgccgtaattttctgtggggcaaagcgaatattgcaaaaacaagcccttggttgcttggtcagtagtttgttctccgaaaa

SEQ ID NO: 15797 - DNA, 322 bp, Glycine max
tgggagagaaatgttcatctaaagcatacaagtccctaatattatcaaatcctaaaatttgagctcctagggagcaaaacaatgtgtgtctcctagagagggcatcagctaccacatttgtatatccctttttgtatttgataacatatggaaattgctctacgtactctacccattttgcatgcctcttgtttaacttgctttgccctctaatgtacttaagtgattgatgatcactatgaatgacaaattccttggtaacaaagtaatgttcacaagtgtggagggctcttattaacgcataaagctctttatcatatgt

SEQ ID NO: 15798 - DNA, 412 bp, Glycine max
  unsure at all n locations
ctctgcgtgctatcagggctttcatcttacagacagcaaaagaaagtntatacggataaccactcgggtatttccacccgtcaacgtgactcanatgtcagtatgacagatcttgtgaaggtggccgacaaaagcgaggctcttgctcctacgtatcctccaatgaggaactcagacctacgtagttcttgataacttgtgagacttgacaaagtctccaccggaagatgctgacatctccggaaagggcgcagatgaccacattggcctctgctcgtcaatcacacttgnggtcactgaatgacgaggtgcggataaccgtaaggtgtctccgcgaactaccagctcttgngtcatggtaacaaanagcggtgcggtcgacaaaagcgaacctcttgctcctacttatccc

SEQ ID NO: 15799 - DNA, 422 bp, Glycine max
  unsure at all n locations
ntgagtatagactcatctctctaattgagtgcatgtacaaggtgttatctaatttgtcggctaatacactcggcaaggtgatacaccaagtgattgatgacacctaatctgtgttcatccaagacaggcatatactggatgacgttcttattggaatgagcttgttgaggaagcaagagtaagtggcatggaaatgattatgttcaaggttgatttccagaaggcatatgactcgatggatcgtgattgtcttatgatgaagacggaagatatgggttttcttaagacatggcatgtatgaattcaagaatgcctgtaaactgcaacaatttttggtatactaaatgggagtccatctaaagaatatgtgtatggtcaaggtcttgggtaacaagatcctttatcacctttcctgtgtctga

SEQ ID NO: 15800 - DNA, 356 bp, Glycine max
  unsure at all n locations
tctcttctggattatctggctctttaaataatgcattatttcatacaaaagttaactacactagctagtatgataaaatcattctccttgactaanatatcctcattaaaatagttaaaatctaattgtaaattagtctaaatagtaatatttttgccatagcacagtatacaatataaattgttatttttatataactaaattcataataataaaaacattaatatgtaaatcatattacaattaaagttcataatanataaatatctagaacatataaattatatgttagatntacaataaataatctatattgtagtacaagagtactgttaactatntgataattcttttaa

SEQ ID NO: 15801 - DNA, 447 bp, Glycine max
  unsure at all n locations
ntgaatgctctattcaatggagttgacaagaatatcttcagtctgatcaacacatgcacagtggccaaggatgcatgggagatcctgaaaaccactcatgaaggaacctccaaagtgaagatgtccagattgcaactattggctacaaaattcgaaaatctgaagatgaaggaggaagagtgtattcatgacttccacatgaacattcttgaaattgccaatgcttgcactgccttgggagaaagaatgacagatgaaaagctggtgagaaagatcctcagatctttgcctaagagatttgacatgaaagtcactgcaatagaggaggcccaagacatttgcaacatgagagtagatgaactcattggttcccttcaaacctttgagctaggactctcggatagggctgaaaagaagagcaagaacttggcgttcgtgtccaatgat

SEQ ID NO: 15802 - DNA, 388 bp, Glycine max
  unsure at all n locations
ctctaatatctcccacactgtgtggggtggccattcttggatggccttgatattctcagggtccacttggaccccatttctaccaactacaaaacctaagataactatattatctacacaaaaggtacacttctctatatttgcatagagggtgtttttcctaaggactgaaagaacttgtctgagatgtcctaagtgatcatctangctcctactatacacttaaatatcatcacaataaacaactacaaatctacctatgaaatcccttaagacatgatgcataagcctcataaaggtgcttggtgcattagatgagcccaaaagcatcactatccattcatacaaaccagacttggtcttgagagcagtgtctcactcatcaccc

SEQ ID NO: 15803 - DNA, 395 bp, Glycine max
  unsure at all n locations
agcttcctttatattatttctatagaagctagagcttagctacacgtacctctctaatagctaagctcacctccttgagatgagaagctagagcttagctacacacccnctataatagctaagctcacccccatgaaaaaatacatgaaataaaaaaaaatccctactacaaaggctactcaaaatgcctcgaaatacaaggctaaaaccctatactactagaatggccaaaatacaaggcccaaacgaaggataaacctattctaatatttacaaagataagtgggctcatacttagcccatgggctngaaatctaccctaaggctcatgagaaccctagggccttcccttggatctctggcacaatctacccggagtcttctatccaatgcct

SEQ ID NO: 15804 - DNA, 293 bp, Glycine max
atagaaggtatgttcctaatttctctacaattgcatcactctctttatgatctggtgaagaagaatgtggcatttacctgtggtgaaaaacaagagcaagcctttgctttgctcatagaaaagctgactaatgcacctgttctagctcttcctgacttgtctaaaacttttgagctataatgtgatgcctctggagtgggagttggagctgtattgttacaacgtgggcaccatattgcttattgtaatgaaagacttcatagtgccaccctcaactaccccacctatgataa

SEQ ID NO: 15805 - DNA, 415 bp, Glycine max
  unsure at all n locations
taatgaaacggcgagatgatgcactccatgagaagttggatcanatggagaatagagatcataatgaataagaaaggaggagacgatggaatgatggtgttcctagacaaaaccgaattgatggtattaaactcaacattcctccatttaaaggaaagaatgatccggaggcctacttggagtgngagacgaanatagagcatgttttttcatgcaacaactatgaggaggaccataaggtgaagctcgccgccacggagttttccgactatgctcttgtgtggtggaacaagctacaaaatgagagagcaagatatgaatagccaatggttgatacatggacagagatgacaaagatcatgangaagcggtatgtgccggctagttactcaatggacttgaaattcaagcttca

SEQ ID NO: 15806 - DNA, 359 bp, Glycine max
  unsure at all n locations
agcttatgtctggtctagtacagatntgagcatatataatactcctaacaattgatgcatactaaattgcttccatttgttntcgttccatatcatttctaggacattgtgcgagactaaatttgtctcctttctgaattggaacgggtgatgctgagcacttttccatcctaaacctctctagtantttattgatatatgctttctaagacaagcctaacaatccttgtgatctatttcagaataattctatccctatcacatagcttgcctcacccatattcttcattttatagttactagaaagaaacttcttagtgtctgaaaaaactatatcattagttgcagcattatcatca

SEQ ID NO: 15807 - DNA, 366 bp, Glycine max
  unsure at all n locations
tggaacaggaagaagccatcagcaaagcacctaagggctttgttatctatatgctacattcatattctagacatgaagaggcacaagcttgaagacaagactatacgaggtatcttccttgggtatagcaatatctctaagggctaccgtgtctacaacttgcaaactaagaaactcgtcatcagtcgagatgttgaagttgatgaatatgcttcttggaattgngatgaagaanaagtggagaagaacgttcttatacctgctcaactacctcaagaagaagatgaggaagaagacccaggtgaaccaccttcactctccaccacacaacaagatcaagaactatcatcacccgagtctactcca

SEQ ID NO: 15808 - DNA, 397 bp, Glycine max
  unsure at all n locations
agctttaagtgataatggttcaaagccncactttgagggtgtgtctctgtttcttcttctgtccatgaaacttctctgtgtcacttgatgaatgagccccacttaaaaagtttgaatattgaggtgaattatctttctgggtgtttttcaagagagcaagttcttgaagtacttggggtttatgtggaatcctctgtctgggttatggacgctgctgctataatggcaattgcacttgccaatggangggtgagttgagcaaattcaatcttgggagtttttaatcactatggttgatgctccatagattatcttttaatttttttttatgcaggtgagccccctgattggcaagattttgttggatcatcaccttgcttctcatcaattcactatc

SEQ ID NO: 15809 - DNA, 319 bp, Glycine max
  unsure at all n locations
tactaagctntgaatgctctattcaatggagttgacaagaatatcttcagtctgatctacacatgcacagtggccaaggatgcatgggagatcctgaaaaccactcatgaaggaacctccaaagtgaagatgtccagattgcaactattggctacaaaattcgaaaatctgaagatgaaggaggaagagtgtattcatgacttccacatgaacattcttgaaattgccaatgcttgcactgccttgggagaaagaatgacagatgaaaagctggtgagaaagatcctcagatctttgcctaagagatttgacatgaaag

SEQ ID NO: 15810 - DNA, 452 bp, Glycine max
  unsure at all n locations
tgtagaatggctagacatgatacatgtcagggcttggtttgtttcatttgtaaaaagggatgccccacattatttccatgacacaaatgcaaaaatgatgatttggaaactttatgcaaaactggtcatgcatgcatctatgcggacactcaaatgtcaaattnttatggtcatgtgatgctagggcccaggattcatttcctctattttatatcaacccaatgtttccaaaatatgttcttttatccatttgtgcattcatccaagtccatttcgggcgtccgggaaaatttcacagcattcacccttcaggtttacacacattntttttcccanaaactagctatgaattagcgaattttcttcanagaaaagttggaagtcatctcttttcaaaagcatgtttggttttcagctagacaaactatttttcttttttttctccttttttt

SEQ ID NO: 15811 - DNA, 113 bp, Glycine max
ccttgaatcttcttcatcaatgatgttacttgcttcttgaagatcaatgacaacagaatggagaatgaggaatggtgatcgaagacgtcacttcacatataatatgagtcaag

SEQ ID NO: 15812 - DNA, 359 bp, Glycine max
  unsure at all n locations
gtaaaactaagctaaaaagtcttagatgggagtgggaccagnccatacattcgttacctgcaatgaacaacgaagcactcgagaaattcaaatttcataacttttcacacggaagtccgtttcatgcgcataatatatcttgaccctcgaaattggtcaccggaaagctctcgagaaattcaagtggtcataacttttcttacggaagtgcgattcaggcgccatatatatctangtgctagaaatngatcaccggaagctctcgagaaaatcanatggacataacttttcaatcgcatggtctgattcaggtgtagaatatatcgagacgcactanattgaacaatgaaagctctcaa

SEQ ID NO: 15813 - DNA, 389 bp, Glycine max
  unsure at all n locations
agcttttggattgatcaagaagtgccttatgaatcctcccgtgcttatgccaccagtacctggaaggcctctcattntgtacatgacaatcttggacgagtcaatggggtgtatgctggggcaacatgacgaatccggaaagaaagagcgcgctgtttactacctgagtaagaagttcacgacctatgaaatgaattactcgttgctcgaaagaacgtgttgtgctttagtatgggcatcccatcgcctaaggcagtacatgctgagccatactacctggttgatatccaagatggacccggttaagtacatctttgaaaagccagctctcacgggacgaatcgcccggtggcaagtcctgctatcncgaattgatatagtctacgtca

SEQ ID NO: 15814 - DNA, 297 bp, Glycine max
  unsure at all n locations
tctccctttgagtntcttcattaactcctctattgttatttgcttccctctctcttttaatctgagtcatctctatgtcatactgagtgtacacagagacaaactctccaattgccatgctacaagccccagcaactaatcctgcaaaaccagcaagaagcatggcactgatgtctntcttaacagctccaacacccatcatcagtgaagcaacagaaaccaacccatcattagctcctaacactgcagctcgaagccactgggccctttgagagtaatcaataatgctactactct

SEQ ID NO: 15815 - DNA, 294 bp, Glycine max
  unsure at all n locations
agcttgtnttcttttcccttcatctcttcggtgtggcaagcttgttttcttttgtgttaggaagtctcacatcgtctgcctcagtctttgtggtgccagttatatatctgttggaccaacttcacttaatgccaattgatttaagatgaaatctaacatgatatcagagcttatagtccgtcttagttttctctaccatgtnggttgaaaaagcagcagtacctgagattntcatccagttgtttgtctcttagaagagcacctacatactactaatctcattaacagttaatc

SEQ ID NO: 15816 - DNA, 334 bp, Glycine max
  unsure at all n locations
tactcaagctaatcatgtgagtgtcgtaggacatctcccaattcaatttaatttctctcccaacacacatcanatagtgcactgaatgcatgtgaaattataaaactacccctaatacaaaactaccccanaaataatgaaaccctaatctaatatgtacaaagataagtgggctcatacttagcccatgggccaaaattctaccctaatgccttcttcagcagctctagcccaatattcttggagtcttctatacaatacccttggagggaggattacatcatatgtggatattattcttgatagtttaatatgccaatgatggacaaagtct

SEQ ID NO: 15817 - DNA, 312 bp, Glycine max
  unsure at all n locations
tgtaatcgattacacacatactgtaatcgattaccagagcatattttcagaanatattctcaacagtcacatctttntatgtggttcttgaatggctatcaaaggcctatatatatgtgacttgagacatgaatttgacaagagtttttntgaacaaaaaggtcttatcctcttaaaaagaanaatcgttttatcctcttacaaattccttggccaaaacacttgtgattcaataaggaattatttgagtgctcaaattgttcaatctatctctttcaagagagatttcttcttttcttcttcttcattctg

SEQ ID NO: 15818 - DNA, 347 bp, Glycine max
  unsure at all n locations
ctctcccctaacaaatgaaccaacttctttaagatantttatctacatccacagcaagatgctcgaaaacctcatacatgtcaagtaaccgaaaacatttttctggtgtgtgtgttcccattgccacggcctcaccataattcaagagatgcagcatgaaactctgagaaatttcagataagcagcattgataaaaggatccaaaatcaccaaggatttgctcacacaatcgtttctcactgacgaggtacacccgaacaatgatcttcatggctcgaatccatttctttatctcgttgttcaagcaatgccactccagttttatcacatccttcattcttaacttt

SEQ ID NO: 15819 - DNA, 318 bp, Glycine max
  unsure at all n locations
nttgcaagctggaatcatttatcctatctccgacagccaatgggtgagtcccgtccaggtagtgccgaagaaaaccggcctcaccgtgataaaaaatgagaaggaggagttgattcctactcgggtgcagaacagttggagagtctgcatcgactatatgaggctgaaccaggttaccaaaaaggaccattttcccctgccattcattgaccagatgcttgaacgcctggcaggtaaatctcactactgtttccttaatggtttntctggttatattaaatcactattgctcttgaggatcangaanaaaccatattc

SEQ ID NO: 15820 - DNA, 233 bp, Glycine max
tatgctgcagacatttacaacatacctcctcaacctctgcagtttaatcaaccacagcagaacaattatgacctctccagcaacagatacaatcccggatggaggaatcaccctaatctcatatggtctacccctcaacaacaacaacagcagcctgctccttcctttcaaaatgatgctggcctaagcaagccatacattcctgcaccaatccaacaacagcaacagaccca

SEQ ID NO: 15821 - DNA, 392 bp, Glycine max
  unsure at all n locations
tctgcatagctgtatatgacataacaatctctaatggcttatctcatctttccttcgatatctggaaagtgtgcgagtgttgtgcaaagaacaaagganagggattcaagagatggcaaatagattgttggcacaaaactatggagttgtgtgcaatttgaagcactaagagaaacaaggttagcgagatgtccaactgatttatgaatgctaaccaggttctcgcatccatcaagtatcaattntcttaaattcatggctctagacacatcaggaaattcagaaaccttatcacaaccggagatattcatgtaagtcaaatggtcaaactgcaaaacatacataanatcagataatcaattaacaacagtacatcaaaatcatgtcaatta

SEQ ID NO: 15822 - DNA, 284 bp, Glycine max
  unsure at all n locations
ggatgcaactgtgatcttatacccatatcagctagatcttgacgggtatcaagccatccttcgtcttgccttgaatgttaaagagcgtcccaatcacactgtcancaaacattttctccacatgcataacatcaatacaatgtctaacgtcaagatcacaccagtacggaagatantagaaatggacctcttcttcatatgcaactctgactttatccttcttttgggcttcccaatacactgttcaggtgtgaacccactgatatacctgctcaccagtcaac

SEQ ID NO: 15823 - DNA, 403 bp, Glycine max
tcttccacgccaataggttccatctcagcaagtaaggccatattgactttatcaccatcagctgtaatcgaggaatctgggaatatctcatagtcatccagccttgcaggggcttgtctatttctctgaggtctcgttgatactgcatcatcatgaacaacattgtcttctgttcctacatccgtgtttagaccttcaattctggttctcaattcagatgtgccctacttatcactccaattccaggattgaccctcatcaaacttcaaatctctactcaacactagtttctgagtttgaggattaaaaaccctgtatgcaccagtagaatggtaaccgagaaatatgaagttctcactcttgtcatcccaatttctctttattgcgtctggaatatgcttat

SEQ ID NO: 15824 - DNA, 395 bp, Glycine max
  unsure at all n locations
tgttgctttgtgtgagggaaccatantcttttgttttctctctgnctttnacaataagtatgtggtcaagatacaccacttgagtcatgaaacccgttccagtggagacaataattgaggttccaagggtgttagacatcatggttgcatggtangcaaacatctcactcatgtggttcttcaacacttgaccaatgttaggtggcattttaccacttggtatagtggcttttgtttgcaatgctactatgtgccttacttgcacaacttttagtgggaacttttcattaagctgttctctagacaacattattccgttagaaccttcttgaacaacaattacctaaattgatacctctattctggttagagtcgggtgaacaatcatgttgtct

SEQ ID NO: 15825 - DNA, 410 bp, Glycine max
  unsure at all n locations
ctaagcttgtaccgaattcttcatcgctctaattatcagattgatgagattcgattaatataaatggctctggatgtggtatgaaataattacactcattcctttccaaccatcatttacgtcaataaactttcacattttgaaattctccaatttacaggctaggggcatgaattgcttacacaccagcacacctacaattgttcatcgagatctaaagtctccaaatcttttggttgataagaactggaatgttaaggtatatgattgaaaacttatgcaggttataatatttgcttattctttattatcgcataacataactaaagagtgccataaaaagtagtgcaataaaataataacaagacgatgatgatgatgtctngttggatgatagtttatgatggaaa

SEQ ID NO: 15826 - DNA, 379 bp, Glycine max
  unsure at all n locations
agctntntggttattataaaacaatgggcaatggttaaagaaagattgtgaaaaagaattggttggaagaatatcatatatgtatattgaatgtgtgcaaaattcatgcttttatagactcttcatgtctggtcaaagaaaccattggaagagtnatgacttttgagaaaaccatgttaagagttataactcttaaacttttcttcnaaactgttcactggtaatcgattaccacaaaggtgtaatcgattacacaatgcattttatgaanagttgtgactcttcacaattggatttgaattccaaccgtcagaatcatttgtaatcgattactaatatanggtaatcaattagactatttgaanatcattttggaatg

SEQ ID NO: 15827 - DNA, 289 bp, Glycine max
aggaacccccagctataatgcgttcttttgaacctctatgtcgtctggaggatgaaggcaacgagttctatatccagagtaagaacaatatgtgttgggtgtggtgaaggaaaccactacttacggtatcaataatcccatcgtgttacaaaacacatttcccttgacatctgaaaagccatcgttctcatgacattgtcctactttgtgtggatttccttgaagttgcacatgctgctgcagaaaagtatatgagaaaagtagctgttgaatttgggattcctctcta

SEQ ID NO: 15828 - DNA, 380 bp, Glycine max
  unsure at all n locations
agctttttctcatttctcattccagacaaacttctcattcttatgagtcagtttagttaggggtagtgccaatttagaaaatccctcaatgaatttcctataatagccagccaaccccaagaaactntgaacttctgttggagttgtcggttgttgccactccataaccgactccactttaattggatccacagcaaccccatctttagaaatcacgtgccctaagaactgcactttctctaaccaaaattcacatttcgacaatttggcgaacaatttcctatccctcaggatatgcaacacaattctcaagtgcttttcatgctcctccttattccttgaatacactaggatatcatcaatgaacacaaccatgaact

SEQ ID NO: 15829 - DNA, 325 bp, Glycine max
tgtgcctcttcatgtctagaatatgaatgtagcatatagatttttagacccttacgtgcttttctgatggcttcttcccgttctaagcttcaattggagtcttgtcttttacagacttagttggacatctgttgagtatgtaaatagtagtgtagattgcttcagcccagaatgtgttaggtagtcccttctccttgagcatcgatctagccatttccataactgtgtgattctttctctcggacactctattttgttgacgagactatgcgactggtagttgtcgctcaatgccttcatcctcacaaaatctttcatactcacg

SEQ ID NO: 15830 - DNA, 419 bp, Glycine max
  unsure at all n locations
ttgcttcttatgtgtgacataaaatagtcacgataagatttgattggttggcaatacacatttaattatattatttgtatttctctcattatttcacttctcatatatgatccacacaaacatataataaagatctaagacaagcttgaaagatgatctgttttaagaaatctggaaggtgattattaagaaggaaaaatattttattcagattaattttattgtcactgagaaagaaaaaagggttatgtgtgtaaaaagtcctacacgattaagatatcattattataatcataagtgagggtggtaagttttaaaaaataattatnttatgatgaattanatgatgatctatcattgacagagaacgtaaatttattttacacatatgtatgaacatcaaactcatanattacata

SEQ ID NO: 15831 - DNA, 328 bp, Glycine max
  unsure at all n locations
ctcaagcctgcattctatgcccagaaagtactcaagagtgctattttgcttaatataanaggnancatncaacttgttcacgatgaggttaatagcagtgttggaggaacccgtgatgattatatcatctacataaatgagattaagcaggcagcaaccatgttttgtgaatacgagaagagagggatcacacttggattgttgaaaaccaaaggagatgagagtatttgtcaaactctcataccaagcccttggggcttgttgtaaaccatatattgccttgtgaagtttgcatacaagagtggattcacccttgattaaagccttg

SEQ ID NO: 15832 - DNA, 342 bp, Glycine max
  unsure at all n locations
ccttgaatcttcttcatcaatgatgttctttgcttcttgaagatcaatgacaacagaatggagaaggaggaanggtgattgaagacgtcacttcaaagagaatatgagtcaagaagaaactcaccacaataggaagtcatggataagagctngaaggtangagaagatgagtgaagggagagggaaagaagagcacganatttatgcctcanatgaggtctaaactttgaagtataattctcaaatgatcaaagttgaaaaaaatgcacacacaagacctctatttatagcctaagtgttacacaaaattagaggaaaaattgaatttctattcaaatttca

SEQ ID NO: 15833 - DNA, 356 bp, Glycine max
  unsure at all n locations
cctcgaataaacatcgaaactcttagactttcatatggccataactntncacacggatgtctgattcgggcgcataatatgtcgagaggctcgaaattgaacaatggaagctcttgagaaattccaatagtcataagttttcacacggatgtccgaatcaggcttataatatatcgatacgagcgaaaataaacatcgaaaactctcgagatatcatatggccataacttttcacaccgatgtccgattcgggcgcataatatgtcgagaggctcataattgaacaacagaagctcttgagaaattcaaatggtcataaactttcacacgggtgttagattaatgcgcatcacata

SEQ ID NO: 15834 - DNA, 381 bp, Glycine max
agcttttcgtctcggatttttccgactatgctcttgtgtggtggaacaagctacaaaaggagagagcaagaaatgaagagccaatggttgatacatggacggagatgaaaaagatcatgaggaagcggtatgttccggctagttactcaagggacttgaaattcaagctccaaaaactaacccaaggcaacaagggggttgaggagtatttcaaggaaatggatgtgctcatgattcaagcaaatattgaagaagatgaggaggtaactatggctcgatttcttaatggtttgactaatgatatccgtgatattgttgagctgcaggagtttgttgaaatggatgatttgcttcacaaagcaatccaagtggagcaacaat

SEQ ID NO: 15835 - DNA, 338 bp, Glycine max
  unsure at all n locations
tgaaattgaacaacggaagctctcgagaaaatcgagttgtcttttatattttcacacagatgtccgattcggggaaataatatatcgagacgcacgatattgaacaacggaagctctcgagaaaattgaatggtcataacatttcactcggatgttcgatccggggacataatttatcgagacgctcgaaattgaacaaccgaagctctcgacaaattagaatggtcgtaacttttcacgcgaatgttcgattcggggacataactcatctagacgctcgaaattgaacaacggaagctctcgagaaattcgaatggtcataagttntcacacggatg

SEQ ID NO: 15836 - DNA, 387 bp, Glycine max
  unsure at all n locations
agcttcttgttatattatgtggcagaatcggacttctgtttgaaaagttatgaccatttgaatttctcgagagctntggttgttcaatttcgagtgtctcgatatattatgcacctgaatcggacttccgtgtgacaagttatgaccatttgaatttcacgagagcattcgttgttcaatttcgagcatctcgatatattatgcgcctgaatcggacttccgtgtgacaagttatgaccatttgagtttctcaagtgcttccgttgttcaatttcaagcttctcgatatattatgcgcctgaatcggacttccgtgtgacaagttatgaccatttgaatttctcgacagcatacgttgttcaatttcgagcgtctcgatatattatg

SEQ ID NO: 15837 - DNA, 258 bp, Glycine max
tctcgatatattatgcgcctgaatcagacttccgttacaaatgttatgaccatatgaatttctcgagagccttcgttgttcaattacgagcgtcttgatatagtatgcgccttaatcggacttccgtgtgataagttatgaccatttgaatttgtcgagagcttccgattttcaatttatagcttctcgatatattatgaacctgaatcggactttcgtgtgacaagttatgacctattggatacctacatagcattc

SEQ ID NO: 15838 - DNA, 364 bp, Glycine max
agcttatgctgcatacatctacaacagacctcctcaacctcagcagcaaaatcaaccacagcagaacaattatgacctctccagctacagatacaatcccggatggaggaatcaccctaatctcagatggtctagccctcaacaacaacaacagcagcctgctcctttctttcaaaatgatgctggcctaagcaagccatacattcctccaccaatccaacatcagcaacatccccagaaacaacagacagttgatgctcctgcgcaaccttgcctcgaagaactcgtgaggcaaatgactatgcacaacatgtatgttcgaacaagagaacagatgctccattcatagcttatctcgccagat

SEQ ID NO: 15839 - DNA, 396 bp, Glycine max
  unsure at all n locations
tatgataggatgagatagaattntatttctaatgttcttcattaagtgttccttcctcaacagctaatttcaatcattatgcatngtattaattcagtccaatctaatctattgtggaatggtcatagggttgcccctttcttacctcaatgtggcttgagacaaggagatcccatgtctccgtatattgttgcgacgtgtatggataagtcatctcatctaatcctttaagctcttcatgcaggtcaatggaagcctatgagagctggtcgaaatggaccattcatctcacacttaatgtttgtggatgatcctttactctctggaaaagcatcaataagtcaaattaaatgtattcaacatggcttgacgactctctgtgatatgtcatgacaa

SEQ ID NO: 15840 - DNA, 423 bp, Glycine max
  unsure at all n locations
tattaaattaagtntattntaatttattataataaatgttatgatcaaatttatgatataagttctaataagatatgataacttattaaataagcaattgattagttaatctaacaacatctatgtattctcatgaattattatctatctaaaaacattntatttattattcaaaacattactttcacaaaaatcaatgtttgaacagaagtttataaacacagaanattataaattaaattgaaatgcattgaaaatataatgattttttataccattatttaatcatgtatatgataaatttgtttatttttataataaatattttaagtcatttataagatgaattttatttgattcatatagcgtanaaattaaattntcattanatatttaaaaactcacttcttaatagatatctag

SEQ ID NO: 15841 - DNA, 288 bp, Glycine max
agcttgttagaaaatctaatggtcattacttgtaactcggaggtccgattgaagcgcatcacatatagagacgctcgatattgaacaaccgaagctcttgagatattcaaatggtcatcacttttacctcggaggtactattcatgcgcatcacatatagagacgctcaaaatcatacagcggaagctctcgagatattcaaatggacataaattgtaactcggaggtacgattcatgcgcatcacatatagagacgctctgtattgaacagcggatgctctcgagat

SEQ ID NO: 15842 - DNA, 261 bp, Glycine max
gtgatcaccttggcaatctgatgctcacaatcatccatatctatcactccatcaagtggtctacccagatattagccgatcacatcatgggagaatatatcacacttgcctctgacaagacactctcgatcatcatcactctttctgtctgatatgtcagagggaatgctgacaatgaataccctgactaggccttcgtaacagtcttccagcttggtgactgtcttcagtagaccagcagacttgttgatgtccatgatc

SEQ ID NO: 15843 - DNA, 382 bp, Glycine max
agcttcaacgttcattttcgagcgtctcgataagttacgggactcaatcagacatccgagataaaagttattgtcgtttgaattagctcagaagttcaacattcaatttcgagcgtctcgatatgttacgggactcaatcagacatccgagtaaaaagtcattgtcgtttgtattggctcagagcttcaacattcaatctcgagcgtctcgatatattacgagcctcaatcagacatccgagtaaaaatttatggtcgtttgtattggctccgagcttcaacgttcattttcgagcgtctcgatatgttacgggactcaatcagacatccgagaaaaatgttattggtcgttgcattggctcagatgttctacactcaattt

SEQ ID NO: 15844 - DNA, 440 bp, Glycine max
  unsure at all n locations
agcttacttgtatgtcttgaacaacaataatgaagttntgccatacatagttaagcatgaagctttagtcaaacagaataatccgaaaatgtcaaagaattgggtgttgaaaaagcataacaagactttctgtgattggtttaaagatacaatctttgcagatgagaatgcttcagaaacattaagaaagctagcagatgggcctaaaagaaatgttataacctggcaaggatatgacaaaagtacaatgtataacagtggggtcaccctaagggctgaatcttaacactttgcaaggtactaggggcattgcacaggccgaaaggcatcctcctatangcaaaagtgccgaaggggcaggtgaatgtggtcttttcctgatcctcangagcaatagtaatatgcatataaccagaaaaaccatcaaggaaacagtagtg

SEQ ID NO: 15845 - DNA, 210 bp, Glycine max
  unsure at all n locations
atctcgacatattgtgtgcccgaatctgaccatcgtgtgagaagttatgaccattngaatttctcgagagcttctaatgtttagtttcgagcgactcgatatattataagcatgaatcggaccttagtgtaaaaagttatgaccattagaattctcaagagcttccgttgntnnaatttgagcgcctcgatatattataagcctgaatcg

SEQ ID NO: 15846 - DNA, 423 bp, Glycine max
  unsure at all n locations
ttctctacaattgcatcacctctcaattatctagtgaagaagaatgtggcatttaactggggtgaaaaacaagagcaagcctttgctttgcttaaagaagagcttactaaggcacctgttctagctcttcctaacttttctaaaacttttgagctaaaatgtgatgcctctggagtgggagttggagctgttttgttgcaaggtgggcaccctattgcttattttagtgaanaacttcatggtgcgacccttaactaccccacctatgataaagagctttatgccttaataagagcactccgaacttgggaacattaccttgtttccaaggaatttgtcattcatagtgatcaacaatcacttaagttcattagagggcaaagcatgttanacaaaaggcatgcaaaatgggtagagtaccta

SEQ ID NO: 15847 - DNA, 432 bp, Glycine max
agcttattgtatcattcaccctttgatatatgatctctaagataaagatatcttatctctacatgtttggttctagtatgcatgacaagatttatagacagattaatagcaattgtgttgtcacatttcaagggaatgcgatcaatgattactctagagtctccaagttattgtgtcatctagagactttgagcgcaatgactttcagctgcaaaatattctgcttccgcggtgaatagtgctacacaagcttgtttcttgtcattccaagatacaagagagctttctaatagatggcatgtcccacttgtgctttgtctatctagttatgatccttctaatagatgttaagcgaaattgcttaagattatcttgatacctagtcacatgaaacactaagcatttatatggttgattgcagtaagtaaaaat

SEQ ID NO: 15848 - DNA, 331 bp, Glycine max
  unsure at all n locations
agcttgatgaggttgatgttaatcttgtgacggataatatggcagtcaattttgatgttnttagttcgtttctggaacacaagattggaagctatttgtatggtggactaattatcacaataaagaatggctggttgaaggaatgaaactctaaaatcttggagaagataagtgagccactgaagctcgcatgttgtggatgctaaagcacgacattcagcttcggaaaaactgcgagagactgtggattgtttctttgatttccaggagatgtgggaggtactgagataaacagtaaacctagtgatggagtgtctggaatcccgacacc

SEQ ID NO: 15849 - DNA, 462 bp, Glycine max
  unsure at all n locations
tcaaagttggccaatagtacctgactcttagaactcttatggccattggtctctccctagaatgcataccacanacaccttcatgtagttctcgaagaacatagtaagcctggtcttggtcaagacattntgagtagaggtgaggagaaacctctcctatatagtttgtcagtcactaaggtataccagacatcttgcattcttagttgtctggcttttcccttgtctattgtgagtgtctcatgttttaagtactcgactatctcttttttccatctcgaagggccttcctccacctgtaagcattcttttcccgagatgttgggttcgggaaccaaatggagtgtgaatgttnttagttaccaaggtttaggtcaagttgcaagttaagccaactcgtcggctttgtcattaacttcttagcttatatgaatcacctaaacttcctcanactcttccttg

SEQ ID NO: 15850 - DNA, 485 bp, Glycine max
  unsure at all n locations
gagatccatagatctaatccaaggtagatgtttcataaatgggatntcgttgcttgtgttgtttgattccagtgccacctattcctttatatcctgtttgtaagtagaaaaacttaagctnttctgtgtcttctttaaataaagatctagtggtggagacccctactagtggttntgtgttaacttcttatgtgtgtttgaattgtcctgtggagatttctagtagaacattcttgattgatttgatttgtttgcctttgagccagattgatgttattcttggtatggaactggtatcttccaaccatgtcttgttaaactgttttgataaaagtgtggtgtttgatgattctgtagtgagtaaagatatgatgtttatctctgccaacaaagttatgacatctntaaaggaagatgctcaagtgtacatgattctgtctaacctggatatagagaacaaggtttctatgtgtgaacttcctatt

SEQ ID NO: 15851 - DNA, 415 bp, Glycine max
  unsure at all n locations
agcttccatcattntatatgaaggagtcgtacctatttgtctaactccaagaattatacctttgttgttgtctccataagtcacatgtccactattctttggagaaatatgagtaaagtttggcgcatctcccgtcatgtgtttggagtagccgctatcaatgtaccaacttttgttcaatgaatccttcatgcatataaccatatttttgatttaggtaccccaattttcttgggtccttgaatgatagttttgactagagatccttttggaacccataccatttttccaaagctactactgattttcctaaaataacatgttgatgcattatgtgcattcttaccacaataaaagcatgtcatgataggagaactagtcttttgagtagatgacaagaaaattttatacatct

SEQ ID NO: 15852 - DNA, 477 bp, Glycine max
  unsure at all n locations
agcttgcttaaagacgtctttgatcaattaattatgttaaaatctagtgaaatactaactaaaaaaaagaaacttataaaatttaatatgagtaatgtacaaatccaaaaataattgataaacaaaatcatattgaattcaagtagttaaaatacaaagaatataaaaaaaatgaacaaaagagagcataatattaaaaaatacatacaaagacaaggaatgactttaatcaggatgggtaagactatttggtgtagatacaaaacttagagaaagaaaatgaattaagaaagtcagaatgcanagggacgtgtgcagaggtgaaatacttataggttacaatacaacttaaaagtacttttattntctatgtattattttataagaatctgaagaattctanaagttttctatttaataatgatacttattattattattaataatacttanatagaccagtttgtcaagttaaca

SEQ ID NO: 15853 - DNA, 377 bp, Glycine max
  unsure at all n locations
agcttgganaacactgtgctcctcccaattcgtcaagcaactcatcaattgtcagtatgggaaagcagtccttgacggtgagggaattcaatgccctgtaatcgacgcagaagcgccaggttccatcatgcttcctgacgaggaggaccggagaagaaaagggactgttactaagttgtatcagtcctttctgaagcatggactcgacctgcaactcaatctcctgcttttggaagtgcggataccggtaaggtcggacatttactgngttagactgaggtagaagatgaatatggtggtctgtggtgcactctgaggtaatgtttgtggtggttggaataggacattatatttggtgagcaaggcctgaatgggtg

SEQ ID NO: 15854 - DNA, 459 bp, Glycine max
  unsure at all n locations
agcttcttggcaatcctcattccagcgatctgtttggttnttgcgtaagagcttgaacaacggctcacaaatggtggtgagctgcgatatgaatctggcaatataattcaagcgtcccaggaaacctcggacttgcctctctgtacggagttctggcatctcaaggatagccttcaccttttcggggtctacctctatccctttctggcttacaatgaaaccgattaatttccctgatttgaccccaaaggtacacttagcggngttcaaccttaattgatatttcttaagcctttcgaacaacttccgcaggttgacaaggtgttcttcctcggatttagatttagcaattatgtcgtccacgtagacctcgatctcttgatgcatcatatcatggaacaaagctaccatggcctgttgataagnntgccccgcattcttgagtccaaaggacatcac

SEQ ID NO: 15855 - DNA, 438 bp, Glycine max
  unsure at all n locations
ntaatgaacttcaactttggcttgagggtatatcctccccaaccactatggtgatatttgctccacttaagagccaccatantttggaatcccttgtcctgcatccaccaatccatgattntgaaaggcttangtccccagtcaatgattntggatctcaaaagaatagggcagtggtctgaanaattcctatccaacacaaactgggtggtatcaggccattgaaccagcccaatttcagataagaaaaacctgtccagcttactcatggcacttccattaggtctgaaccaagtgaacattctgccaatagatctaacctcctctaaggccataagtgaaatccaagagttgaattcagcaatgctagaggagttgaccacattctgagatgaactcactctctcattntgatgtcagtggagaaaggtgatgaca

SEQ ID NO: 15856 - DNA, 405 bp, Glycine max
  unsure at all n locations
agcttcgattntattatttcgagcttcacgatatattacgcgactcaatcggacttccgagtgaaaagttattttcgttagaatttgctacgatcttcgantttaaatatcgagcgtctcgatatattacgggactcaatcggacttccgagtgaaatgttattgtcgttcaaatttgctacgagcttcggttttaaatttctagcgtctggatatattacgggactcaatcggacttccgagtgaaatgttattgtcgttcgaattggctatgagcttcaattttatatgtctagcgtctagatatattacgggactcaatcggacttccgagtgatatgttattgtcgctcgatttgctacgagactcggtcttaatntctatcgtctgatatttacggactc

SEQ ID NO: 15857 - DNA, 423 bp, Glycine max
  unsure at all n locations
tgtagcanattcgaacgacaataacatttcactcggaagtccgattgtgttccgtaatatatcgacacgctcaaaatttagaaccgaaggtcgcagcanattctaacgacaataacatttcactcggatctccgattgagtcccgtaatatatcgagacgctcgaaatttaaaaccgaagctcgcagcaaatgctaacgacaataacatttcactcggaagtccgattgagtcccgtaatatatcgagacgctcaaaatttagaaccgaagctcgcagcaaatgctaacgacaataacatttcactcggaagtccgattgagtgccgtaatatatcgagacgctcgaaatttaaaaccgatgctcgcagcaaattcgaacgacaataacatttcactcggaagtctattgagtcgcgaatata

SEQ ID NO: 15858 - DNA, 237 bp, Glycine max
agcttaaacattcaatttcgagcgtctcgatatattacgggactcaatcagacatccgagttaaaagttattgtcagttgaatttgctcatagcttcaacatttaatttcgagcgtctcgatatattacgagactatatcagacatctgagtaaatagttattgacgtctgaattcgctcataggttcaacattcactttcgagcgtgtcgatatattacgggcctcaatcacacat

SEQ ID NO: 15859 - DNA, 438 bp, Glycine max
actcagctatgttgcaacattataatagatctcctcagcagcataaccaacaactatctgaattattatgatctttacagcaacagatacaatccaggttggaggaatcatccaaatttgagatgggcaagcctccacacaacacagcctgctctgctttccagaatgctgctggtccaagctagccatatgttcctactccaatacagtcggagtcacaacaaatactacaagcaactgacgctcttcctcaaccttccttaaaagagttagtgaggcatatgaccatccagaatatgcaattacagtaagagacaagagcctttattcagagtttgacaaatcagatggggcatatggctactcaattgatccaagctcagtcccaatatcttacaaatattcttgacaactgtgcagaatctgaaaatgtgagtg

SEQ ID NO: 15860 - DNA, 460 bp, Glycine max
agcttgtaacatatattattcaatacaaggtcctctcaaggatttagtcaaaacatatgcaagttgattgtttgaactaacaaactcggtagaaatctaattggacagtagctttccctcataaaatgacaatcaatttttatgagcttagttctatcatgaaacacttgattataagcaatatgaaagtttgtctggctatcacaatacaatttcattggctaaattgcatagaattgtagttcttgaaggagatgtttgatccacaccgactcacatgtggttgtggccatggtcctatattcagctcttgcactacattgagcaacattaaactgtttcttactcttcctagagataagatctccaccaatggagacactatcttgtgttaaagagtctatctatatgagaacctgtgcaatctatatcacaatacccaaagaattgtgcatctcat

SEQ ID NO: 15861 - DNA, 447 bp, Glycine max
  unsure at all n locations
tgatggtgttgagaagaaatcacatgtttgtcatcatcaaanagggggagaatgtgaatgtatgtatacatgattntgataatgtcaaaagaagaatcaaacaaggctcattntgcttcaagattaatacaagattgtttcaacaaacaaagccttaattcaagatttcttcaagatcaagccttgcctcacaatgaaaggtttcaagtcattcaaggcacatgtaattgattaccaatacatgtaatcgattaccaatggtttgaaagtgtgtaatcgattacacatcatatgtaatcgattaccagagactttgaatgttgggaaattcaaatttaaatgaagggtcacaactgttcaagaaaaacaactgtgtaattgattacactaattctgtaatcgataccagagaggaatttaaggaatatcgcaacagcacatcttata

SEQ ID NO: 15862 - DNA, 299 bp, Glycine max
  unsure at all n locations
atcctatctccgatagccaatgggtaagttccgtgcatttagttctaaagaaaaccggtctcaccgtgatcaaaaatgagaaggaggagttgattcctactcgggtgcagaacagttggagggtctgcatcgactataagacgctgaaccatgttaccaaataggaccattttgcactgccattcattgaccagatgcttgaacgcctggcaagattctacaggcgctctattagagaatttagcacggcacctgattggaccgccccatttgagctaatgtgcgatgcatncaattac

SEQ ID NO: 15863 - DNA, 406 bp, Glycine max
  unsure at all n locations
agctntcgagcaattcttatggtcataactcttcactcggaggttcgattaaagcgcataatatatcgaggtgctcgaaattgagaaccggaagctctcgagaaattcaaatggtcataacttttaactcggaggtccgattcaggtgcataatatatcgagacgctcgaaattcaacaatggaagctctggagcaaatcaaatggtcataacttttcactaggaggttcgactcatgcgcataatatatcgaggcgctcgaaattgacaaccggaagctctcgagagattcacatggtcataactattcactcagaggttcaggtcctgtgcataatatattgagacgctcgatattgaacaacagatgctctcgagatattaaatgagcataactcttcactta

SEQ ID NO: 15864 - DNA, 433 bp, Glycine max
  unsure at all n locations
tccattgttgaatctcgagcgtctcgatatatcatgcgctntaatcggtctctccgagttaanagttatgaccatntgaatttctcgaaagcttccgttgatgaatttcaagcgtctcgatatattatgcgcctgaatcggatctccgagtgagaagttatgaccatttaaatttctagagtccttccgttggtcaatttcgagcgtctcgatatattatgcgcctgaatcggacctccgagttaaaagttatgaccatctgaatttctagagaccttccgctgttcaatttagagcgtctcgatatattatgcgcctgaatcggacctccgagtgaagagttatgaccatctgaattgttccagagcttccattggtgaatctcgagcgtctcgatatattatgcgcctgaatcggacctccgagtgcaaag

SEQ ID NO: 15865 - DNA, 469 bp, Glycine max
  unsure at all n locations
agcttaatagtcttctagtaaagtattcactggtagcagtaaaattattaatcagctatatatcacgggtgatattaaataaactgcctaattatcaattatatcatgcattgggctgataagagctcgacgctattatctctatactcaatacatactatcaaggatactttatcagtggtcacaggaaatgtacgtggtaccatttcatcatactatntagcattaaaggtatgctctccctatatctatatctttatgcacactatacaagcttacaactagttggtttagaataatataataactgtgattatatatataatcaaactgtagcgtttacaataatatgatttaataagtagatattacataacgtagtaataattatagttgtttatctggactcgctgaatgttaagacaccaaatgtcaacttccacatgttcctattgtcagtacctacact

SEQ ID NO: 15866 - DNA, 420 bp, Glycine max
  unsure at all n locations
agcttcattcttagtatgaagtaagtagagatacatatatcgtgaataatcatctataaaggttatgaagtatttcggactatttgcatccatgtctggacaacatatgtctgtatgtatgatttctaataaattagaactcctctntgcaccctttttagacttgttagtttgcttacccttaatgcaatctacacaagtctcanaatcagcgaaatccaaagtactaagtactccttcatttactaatcgcttgattctttcaatagagatatgtcctaatctccggtgccacaacatagaggattcttcattcacaatacatcgttntaacccaacagaaacgtgcatagaagtagcgtcattttgcaattcaatcgaataaagaccatcaaccaattgaccacaaccaataatttc

SEQ ID NO: 15867 - DNA, 466 bp, Glycine max
  unsure at all n locations
tgggttggatgttgaattctggttgttcctggtgcggatatgattgtacagcgggtgaaccaggggctgaagtctcttttggtgaggtagccatggaaaagcagagcgtttggaatggtttagcaaatttctgagagctgttgggggatgctgaatacgagattatcacgaatatataagtttgaatgaagaatgtaaaaggccgtgtgaagcaacggtcgaatttgctttggttcagtagtgaacgtgctattaatgttaggtgattcgtttgggcacgtcagatatcagtagttgctacaattcctctagcagacaaatgcccagcttgcccctcagttattcaaactgttntgcatccaatgcctttgtaaaatatctgctatttgttcctcagtggtcacatgctccagtgtgataactctatcatcaacaagctctcttgatatagtgatgtctgatgtca

SEQ ID NO: 15868 - DNA, 419 bp, Glycine max
  unsure at all n locations
agcttggatttccttttagtagggaatctatccttcctaagatggagccaaacccagtcaccctcattaagaactagctcttttcttcctctattgcctttagttgaatacacctttgtttggttctctatttggttcttaaccctctcatgcaacttctttacaaattctgacctagattccccttctttatgtataaaagaagtgtccagtgggaggggaatgaggtctaatggtgttaggggattgaacccatagacaacctcaaaaaggggactgcttggtggttctatgaaccccccctgttgatgcaaatctatatgangaagatactatcctaagacttatggttgctttcagacgacccttanagggtggataaaacctattactacctttgttgcccatcagttatggat

SEQ ID NO: 15869 - DNA, 458 bp, Glycine max
  unsure at all n locations
ctgtanggctaaagtctcacgaatgtcacgtgttgatgcaataattgttattcgtggctatacaagacatcttgccagacaaagtcaggttagccataactcgcctgtgctttgtcttccatgccatatgtagcanagtcgttgatcctatcatgtttgatgagctggaaaatgaggctgcaattatactgtgccagttggagatgtattttccccctaccttctttgacatcatgattcacttgattatgcatctcgtcagagaaatcaaatgttatggtcctgtttatttgcagtggatgtccccagttgagcgatacatgaagattttaaaatgatatgaatatctatatatccagaacatctattgttgagaggacattgcagaagngccattgaattctgtcagaatacatcgagaagctaaacctgttggccttctaagtctcagcatgatg

SEQ ID NO: 15870 - DNA, 376 bp, Glycine max
  unsure at all n locations
tagcttgtaagatctgcaagatcatcttccttgacaactccttgaaaattattgccatcaatacgcagagatgacaatttagagagtgatccaatactttcaaatggatttccactgaatttattaatagacagatagagatatcttaatgatgaaagctttccaaatgatcttggaagagcaccaccaattaagttgttggaaaaatctagcatgtctatatttttaaaagccccaatttgatctgtcagattgcctganagttgtgaactctgatctgcaagtgttgtgagtccatgggatatacaatgagcaagaatttctgaaagtcattaacctggtggctgagtctgagatatgataaacctatctccct

SEQ ID NO: 15871 - DNA, 409 bp, Glycine max
  unsure at all n locations
agcttgagagatntatgtaattttataaaatttccaggataattagtgtaatttattttatactttntgaacagcaaccaatataagtacatttttttatttttaatcattatctaaacatggtatttttttttaaagatgaatgtgataatttgttaataatatatgtattatataagaaacattaaatatgcttgattaaacatttcaaattaattttaaattacacattaaatgtttctaagtttaataaatgtgcattaataatataaacattaaaaattgattaatttatataaagaattttacttatatgaaacttttacatgtttctttaaagaggcatgtattgtttattcaatgaattttattccttccaacatanatctatctttttgttttaattacc

SEQ ID NO: 15872 - DNA, 375 bp, Glycine max
  unsure at all n locations
agcttgtatggttatatgtctacgatngtcacgtgctcatgcaacaattgttagccatggctatacgagacatcttgcccaacaaagtcaggttagcgataactcgcctgtactttntcttccatgctatatgtagcaaagtcattgatccagtcaagtttgatgagttggaaaatgatgccgcaattatactgtgccagttggagatgtattttccccctgctttctttaacatcattattcacttgattgtgcatctggtcagagaaatcaaatggtgtggtcctgtntatctacggtggatgtactcggttgagcgatacatgaagatcttaanagggtatacatagaatctatatcgtccagaagcatcta

SEQ ID NO: 15873 - DNA, 440 bp, Glycine max
  unsure at all n locations
agcttctggtgggacatcttgacttgctttccaatctgacattcaccacagattctgccttcttctattgtcagattgagaatgcctctaacagcacctttgtcaatgattttcttcatgcctcttaagtgcagatgtccaaatctttgatgccatattttgacttcatcttctttggaggatagacatgtggaggagtaactggtttcttgaggtgtccataggtaacagttgtcctttgatctgctgcccttcattagaacttcactcttctcatttgtcaccaagcattctgactttgtgaagtttacattgaatccttcatcacacaactgactgatgctgatcaagtttgcagtcagtcccttcaccagcagtactgtgttcagactatgaagtccatcattgactagctntcccattccagtgatctttcctta

SEQ ID NO: 15874 - DNA, 498 bp, Glycine max
  unsure at all n locations
nttcactcggagatctgattcaggcgcataatatatcgagacgcttgataatgaacaacggaagctctcgagaaattccaatggtcattacctttaactcggaggtctgatttaggcgcataatatatcaagacngctcgaaatgaacaacggaagctctctagaaattcaaatggtcataacttttcactccgaggttcgattcaagtgcatgatatatccagacgctcgaaattgaacaatagaagctctcgagaaattcaaatggccataacctttaactcggaggtccgatttaggcgcataatatatcgagacgctcgatatttaacaatggaagctcttgngcaattccaatggtcataactnttaactcggacgtccgattcgagtgcanaatatatcgagacgatcgaaattgaataatggaagctattgagcaattcatatgatcataactnttcacttggaggtccgatngaggcgcataatatatcg

SEQ ID NO: 15875 - DNA, 350 bp, Glycine max
  unsure at all n locations
ctctcttgctctacggaacatgagtaatacacaaacaaccaaatatcttatgaaatntcagagatggtttgtaaccatactaaacctcaaacggtgtttgatccttcaatgctctggtgggaagtctattctgataaataacaacagtacttgctgcctctgcccataatttctatggcaattcttctcatcaacatgcatcttgcatctccaaatatatctattatcctctactaacccatgttgtgtggggataaaactgtaagttatgttcatgcctatcctacaaattgataattatcaatgtgtctcgggccttgcaacctaaattgatctgaaccgttcatctc

SEQ ID NO: 15876 - DNA, 394 bp, Glycine max
agcttcctcagagccttattctatgatgacaaacatttggaaagttagtctacacgataatgcttactttatcacaaaaatgatatgctaatctttacgatataaaacgaactcatgcacacattaatgtagtacatttatgaacatgcgcatgtgtaaaatatcctactatatatgtcaacatacgaggacattcatcacattctagttaccacacatatatacatctgtgaaaagaatacacatttccatgctcaatgcattgagcaaaaattacacctattcacatactatatatattgctatcacaaactacctacacatatgtgaagatgtatcataaaatttctgtatgtactccatatattatatcacactgaaagtaatacgtatg

SEQ ID NO: 15877 - DNA, 417 bp, Glycine max
  unsure at all n locations
agcttctacattcaatttcgagcttttcgatatattacgggactcaatcggacatccgagtaaaaagttattgtagtttgaatntgctcaaggcttcagtattccatttcgagcgtctcgatatattacgggactcaatcggacatccgagtaaaaagttattgttgtttgaatntgctcagagcttctgtattccatttcgagcatctcgatatattacgggactcaatcagacatccgagtacaaagttattgtagtttgaatttgctcaaggcttcggtattccatttcgagcgtctcgatgaattacgggactcaatcagacatccgagtcaaaagttattggtcgttgaatttgctcagagcttctacattcaatctcgagcttgtcgatatattacgggactcaatcagac

SEQ ID NO: 15878 - DNA, 305 bp, Glycine max
  unsure at all n locations
actcggatgtcatattgagttccgtaatatatcgaaaagctcgaaattgaatgttgaagctctaagcaaattcaaacgacaaaanacttttactcggatgtctgattgagtcccgtaatatatcgaaaagctcgaatgtgaatgtagaagctctgagcatattcaaacgacaataactntttactcggatgtctgattgagtcccgtaatatatcgagatgctcgaaatggaataccgaagctctgacaaatncaaacaataataactttttactcggatgtccgattgagtcccgtaatatatc

SEQ ID NO: 15879 - DNA, 301 bp, Glycine max
aatgatagatctcatccagcgcaagttgttgcaacccacatacgcacactgctatataaacatgaaagctgcacgagttttctaccaagttcgggattgaagaatattttgtgagtcttggaacttgagtgttttgtgagccaccttgatgtcaccctaacatcaagtgttggacctgagtgtgtagagctgatctctattgttcagagagcaatctctggtgtgtctttgatttatttgtatacaccggagagtgattgagagggagtgagatggcgtctcatatctaagagtggctctt

SEQ ID NO: 15880 - DNA, 306 bp, Glycine max
  unsure at all n locations
actcgcatgtctggttgagtcccgtattatatcgagacgctcgaaattgaatgttgaagctntgagcaaattcaaacgacaataaccttttactcggatgtctgattgagtcccgtaatatatcgagacgctcgatattgaatgttgaagctgagagcaaattcanacgacaataacttcttactcggatgtgtgattgagacccgtcatatatcgagacgctcgaaattgaatggtgaagctctgagcagattcatacgacgataactttctactctgatgtctgattgagtgccgcaatatatc

SEQ ID NO: 15881 - DNA, 363 bp, Glycine max
  unsure at all n locations
agcttccatcatanggtaccctagaaatatangatntttcagctattgtattttaaggcacctagactagtttttgtattaagggtagttttgtaatttcacatgcactaagtgaatatttgatgtgtgtgttgggaaataaatttaattgaattggtagaacccccaatccaattaaattttagagggggaggtgaacattntcttactacaccccattgccacatcatatagtcacactttgtgcatgtccttcatgctttacatgtctcatgacacctaagcacaattagtggagaatcttggaattgatcttggattagtgggctgaaccataactganattcactaatcataattagt

SEQ ID NO: 15882 - DNA, 382 bp, Glycine max
  unsure at all n locations
acaatgatcacaaaattcaagtntatctagtttatcaccacctaacagaatttgtttctcaagttcatgtaatcctctntcactaacatgacctaatctcanatgccaaagttttgttttatcaatcaatgtattactagctatcaatgcatgtccaacaatggtggaaccttcaagaataaacaagccattacttttattcttggtacccttagctatgattaaagatccatttgaaatcttaagaacaccatttaaaattctagttgaatatcatggatcatcaaacantgttatggaaataagatttcttttgagttctggaatggtaccttacattttcagtagatactctctattatcaaacatctttaatctcaca

SEQ ID NO: 15883 - DNA, 439 bp, Glycine max
  unsure at all n locations
ttattgtagttgctntagaacttgctcttttaggcttcaattntcttagattaataatatataaacattcttatatactattttgttggtccttattataaggtccaattaactaattatcaaaattaagaaaattggtgaatttagttgagggcattaaagacattnttgtgaaaaaaataatacaaaggacattntangttgaaccttataataaggatcaagtgacacttgtaatgtggatattataataagcattagatggagtaccatattaacacccataanttttctttcactctttttctatcatgtaatatcaattaaccatacttgatntctttctcttctctctttatgtgtcaattagtggtcaatgaatgtntntntcatttcttaactcanattgaaaatagaaatatttatttttaacaactaa

SEQ ID NO: 15884 - DNA, 334 bp, Glycine max
agcttcaacatcagactcacttcaggtgctggaattacttcacatggacttgatggggcctatgcaagttgaaagccttagaggaaagaggtatgcctatgtttgtgtggatgattactccagatttacctgggtcaactttatcagagaaaaatcagacacctttgaagtattcaaggagttgagtctaagacttcaaagagaaaaagactgtgtcatcaagagaatcaggagtgaccatggcagagagtttgaaaacagcaggttcactgaattctgcacatctgaaggcatcactcatgagttctctgcagccattacaccacaacagaat

SEQ ID NO: 15885 - DNA, 409 bp, Glycine max
  unsure at all n locations
agctgtaagacatattgctgcatcgttatggatatgtcgcatgatcatcccatctgttgacgtgggtaccttggtgatcagatagcttctcctatctctgacggaacgactggaatctgtgattggatatcatagcctattgtgagtaattagctccaactcatgagatgatccctcagatctgggacatagcagacattctgatatgacacatgtcttacatctttcgaatacacgaagatcttacattttccttgtacaagaatcttagaattatcaccanatgagacattgtcacttactgattcatcaagatccacgaacatgcttctgttctacacatatggttgcttgcaccaatgtcaaaggatcatgtgttttcttggctaccttcattacctccacatgc

SEQ ID NO: 15886 - DNA, 399 bp, Glycine max
  unsure at all n locations
ttcttggtggtgaagctccttcttccttggcttattccctagtggatggtgcctcccctatcctcttctcctttgccttccgctgcatctccatgatgaanaatcaccattgaaggacctcattgaagatcaaagatccagcctccatagaagctccacaagcaagcttccatcaagttatgaccatttgaatttctcgagatcttccgtggttcaatttcnggcgtctccatatgtcatgtgcctgaatcggacctccgtaagaaaatntatgaccatttgaacttctctagagcttccgttggttaatttcgagcttctcgatatctgatgtgcctgaatcggacatccgagtgaannagtggacaatttaatttctcagagcttcgttgtcaattt

SEQ ID NO: 15887 - DNA, 332 bp, Glycine max
aacagagatatctattctatagatacatataattataacaatttccatggctctttatactgtttcagcactgctgcttgctaccacgtactgtgttttagctatggtaaccaagttaccccatacaagtgagcaataacctattatagaccttctgtgagtgatagaccctacccagtcaacattagcgtatgccttgatggttcatactgcggtatctttgtgttacgagaagacatatgcatatgcccttccttctcaagatccgatatactacctttaggtagtcttgatagggagaatgtgtgagatgacttactaaacttacccca

SEQ ID NO: 15888 - DNA, 314 bp, Glycine max
  unsure at all n locations
ccccaatgccacaagatataaaaaagatagttatttccaaaatgtcaagatggngtgagatnatgattgtgatgcaatcccaccccccaagggcactggatagaagactccaagaagattgagccagagatgcaagagaaggccctatgattctcatgagccttanggtagatttcgagcccatgggctaagtacaagcccacttatctgtgtacatattagattaatggttcattatttctgggngttgtatttatggctccataatgtangtagggtaccctagaaatgtaggatnnttcacccttgtattt

SEQ ID NO: 15889 - DNA, 343 bp, Glycine max
agctttatcttatattgtcagatgcagcattgaggatcagagatattaactatggtccagatgtgctcatggaagaaattgaaaaatacaagacgtatgccgagaggttggagccctttattgctgatactgtgcttgtcatgaatgatgccatataacaaaagaagaagatttttgttgaaggacgacaagctaccatgttggacattgattttcgaacttatccctttgttacttcttctagcccatcaacaggcaggatatgcactggtctaggtattgctccaaaggtagttggtgattaatatgagtggtacgtggatatttatctatttctttttta

SEQ ID NO: 15890 - DNA, 249 bp, Glycine max
  unsure at all n locations
tcttcttctattgtccatgtcttcttctggcttaattcatcagtgngctatccttctgtgtgcagcatcattgtgatgttcccagcctttgatgacagctatccaggttctgctatccagtgatgtgaggaatgccaccatccttgctctccagtattcatagttggttccatctaagattggtggtctgttcactggtcctacttctttctccatgttcatcagaatatatctccctagatctactct

SEQ ID NO: 15891 - DNA, 300 bp, Glycine max
  unsure at all n locations
agcttcgcacttgataacggagaacacatgagcagcgctaggcaatgacattcatggtgctcccgaaaaaggtggagtatggaggattgccttgagggtccgcacttangcaatcatgaaactcagctccaaactcgaaagtggaggacacgtgaacagccctaagcaataacattcatgtgactctagaaaaggatgagaatggangattgccttgagggtcctctcttangcnatcatggaacatagcttcaaactcgaaaatggaggacacacgaatgacaatgcaattcattcatg

SEQ ID NO: 15892 - DNA, 436 bp, Glycine max
  unsure at all n locations
tcttcttaatgaaaccgttaanaaggcactctntaacatcctttgaataagcttaatgttnntgtgagcaacaaaggctaaaatgattcttataacttcaagtctagcaacatgaacaaaggtttcagagaaatctataactttntgttgattatatcctcaagctactaacctagctntgttgcatactacttttccttgttcatccaacttgtttctgaagattcatcttgttccaatggtgctcttgttntctggcattggaacaaatgtccagacattcattttgttaaactgattcagtttttcttccattgtgattatttagtcattntctatcanagctntgtctatagttntaggttngattcanacacatgngtcttaatgatatctagtttaactccttcntctaatctcagatatatgatcttat

SEQ ID NO: 15893 - DNA, 449 bp, Glycine max
  unsure at all n locations
agcgatgctctagagatcctctacaggcatgctgcctgcgtccagccgcttgatatatttgatggactcatggtcactatgaatgacaaattccttgggataaaggtagtgttgccatgttttcaaagcccgtactaaggcatacaactccttatcataagttgaatagttaagggtaggaccacttaacttttcactaaaataagcagttggatggccttcttgcatcaacacagccccaatcccaacatttgaagcatcacactcaatttcaaaagaattttgaaagtntggcaacgcaagtataggggcattagttagctnttgcttaagaacattgaaagcttcttcttgtttctcttcccatttgaaaccagcatttttcttgagcacttcattgagaggtgctgccaatgtgctaaaatccttcacaaatcgtctataaaaac

SEQ ID NO: 15894 - DNA, 270 bp, Glycine max
  unsure at all n locations
tgtgcttggatcgttcatgatgagcangtntgaaccaatacttatagcanatntattatcacagaataacatcatagagggcacatcaacttcaaagtgaagaagtaacttgcttaaccaaacaatttcactagtaacagaagacaagacacgatattcagcttcagtggatgatttaaaatagtgggttgtntcttagaatgccaagaaagaagttggttcccanaaaacacaaaagtcagaagtggatcttttggtatcaacacaact

SEQ ID NO: 15895 - DNA, 293 bp, Glycine max
  unsure at all n locations
ttgcgccgctacgctctccgacttgtctccaggccgccctcagccggagccaagatcaaagagccagcgcgcaccgtggaggtcgcatgctttcttcggtattgcctgttcaccaccacagaccagttgatccttatggtgcagcgccggatcgccgatctgtggcgtcaggctgccgccgatgtccccgctaccgtcaattgngccgcaatgtacaaaacgctgctcggcgaactttgtgccttgagcgcgcaaagtgcggtgccagatgctgagttgcgtgcccgtcttga

SEQ ID NO: 15896 - DNA, 393 bp, Glycine max
  unsure at all n locations
agcttcanacttgcatcanaggagttgagcaggtaaaaaagattcgtcttcaaactcttagaggtgactttgagcgtttgtttatggaggagtccgagtcaatttctgattatttttctcgagtattggccgtagtcaatcaacttaaaagaaatggtgaagatgttgatgaggtgaaagtcatggaaaaaatacttcgaactttaaatccaagctttgacttcattgttaccaacattgaagaaaacaaggatttatagaccatgactattgagcaactcatgggttccttacaagcatacgaagaanaacaaaagagaanaattaaacanaaggaggctacngagcaactactacaactcaacgtaaaggaagcatactatgcaaattaca

SEQ ID NO: 15897 - DNA, 239 bp, Glycine max
  unsure at all n locations
cctcatcagcanaaccaacaactgcagaataattatgatctttcaagcaacanatacaatccaggttgaagaaatcatccaaatctgagatgggcaattcctccacaacaacagcagcctgtccctcctttccaaaatgttgttggtccaagcaagccatatgttcctcctccaatacagcagcagcaactgcagcagtcacaataaagacaacaagcaactgaggctcctcctcaatc

SEQ ID NO: 15898 - DNA, 437 bp, Glycine max
  unsure at all n locations
tctatacaagtngaggtttctctttacctgaatagtatagtgtacaatttgatgtctntgtgtgtagcataagccanaaggaatttgatggctccaagttcttctattggtgttaaagtttcttcatatcaattccttcttattgattatatccttgagccaccagtcttacgttgattctaactatctctcctttttcttgttcttganaacccatttggttccaattactaactaattcttaagagatggtacaagattccatactntgttctttgtgagccgactctattattcttccatagtagcaacccaagaatcttcactcaatgcttcatcaatgttctttggctcaattattgagaagagtgtcatcatncctttctctttgttcaaagaagctcttgtnttgactccagatgttatttctctaatga

SEQ ID NO: 15899 - DNA, 385 bp, Glycine max
  unsure at all n locations
agcttgtaacagttagatntagtataatttacgtttaatactatataatcttcttacttgactgtttgtacaagattacttttcttcccgtgatcaacatggatttcttttaggagatatatataaagttgatttatttgttaaaaaaatcctaaattcgattatgatattgatttgaaatatttttcattaaaaatgataattaatcttttttaccaataaaatttattttataccttctggttaaactatttgattaagatagatacattattaccacttatataaatcgtttttatcttaaaaatcatatatttttgtgagtaaatgtatttttaaagagtaaataataatatatgccaaaaatatataatactattctcta

SEQ ID NO: 15900 - DNA, 392 bp, Glycine max
  unsure at all n locations
agcttctacttgcttggaattttccagtctatctttcttattttttcgcctacattcttcttcaagaatagcttaagcaacatcattaaaggttagacaagtgacattattattatttgttatgttgataatgagtttatcatataaatctggtagactctaaagtagaagctctacccgtttgttttcttctatgttaaaatttgatgagggaaattgngaaaataaagtattcaggttttcatgtggtatgtcacccaagtggactcactcgttcgaagagtgcagagtttcctcttcaagaatattctagtctgaagtgacttgatctcatacaatttgtggaaagtatcccanatatccttcacgttntccattgttaagtgcaaatt

SEQ ID NO: 15901 - DNA, 401 bp, Glycine max
cttgcaagcttgtgttccttgttaattattggtattagttgttgtttatgtgaatattagttgttaaatttcaattgaattatgttatatgatacacacatgttaaagtagttgcattactattagactctcttatacattaattggtttatatgaactgggagaatgattatataattagaaaaacaattatagataaaattgtctaagtgagatttaaatctaacatgaaagatgaaattagaaagcttgaccattgtgtcaattaatgtcattggtatattgaaatatgacttataataaatgaatatatgctaataatcgaaatatgacttatacactgtgtgtttaaagtgttgttgtttatttttgcacttctgagatattattatgatctttat

SEQ ID NO: 15902 - DNA, 335 bp, Glycine max
  unsure at all n locations
gtattaattattattgttaaccttccagtatatatatttcgatatcatcattcatgttggtgtctttcctctgcgggcatggcgattttgtcctaatttcttttagaatgcatttagattcataattttacttgacgaaagcaatttattagataatttacatctctttaatctaanatcgattgtttgaatgttcttttataaagaatctaaattgttataattctacacaattaacaatatagaattttaatttccttctaacaagtgagaaattgacattctcttcttgatcaaagagccttaaaaaatatgtgcgtaatttctttaatacc

SEQ ID NO: 15903 - DNA, 417 bp, Glycine max
  unsure at all n locations
agcttcacatggagctacatcagaatggtcttaaagtgtgggaattgtggcagtgctaaggtaagtcccacttgagaggagaaggtagaaagattgcttgagaagaaaagctctcttaatatctccttttcgttggactagctcatctaggtccctatatggaaggagttcaaccttgtcccccacttccatattaagcccactaaggaacctagctatgcttgttttttccacctccctaagtccagctcttaaaaggagtagttccatttgttgtctatattctttgacactcatacttctttgtctaagcctttggagcttgtccataagctccctttcatagtangagggaatgtgcctcttcctaagggcattcttaagatcatttccatactttactggangatccccatg

SEQ ID NO: 15904 - DNA, 481 bp, Glycine max
  unsure at all n locations
ctataatactcagctttatcaagagttttactctctggtaatcgattaccagtggcaagttntgttttcaaaaagctntcaactgaatttacaatgttccaatcaatttcaaaatggtgtaatcaattacaatatattggtaatcgattaccagtgtgtttgaacgttgaaattcaaattcaaatgtgaagagtcacatcctttcacanaaatgctntgtgtaatcgattacaatgatttggtaatcaattaccagtgataaattttgaataaaaatcaaaagatgtaactcttccaatggttctcaagtttttctaaaggttataactcttctaatggttttcttgaccagatatgaagagtctataanagcaagaccttgacttgcatttaagaatcattctaacaattatacaatcctttatacctttgaactctttgacatcttcttttctcttctttgaaaagtttctaaagttat

SEQ ID NO: 15905 - DNA, 407 bp, Glycine max
  unsure at all n locations
ntcacaagttatctcataactcanagccttgtggcacaacacaatagctcttgcttcatgtgtttaccttcttgctgtgtctattccattgtggacaagtgcatcaagtgaagtatgtggatgcctcccgagttattcgccttctggtagccaaaggctctaatgaagtatgtngataccactgtcgtccaggaagaccttgttagaattaatgtctcatgtgagaggcatgtgactttatgtaggactaataaataaatcattaataattaacgactaaattgttattgtgtaaataggagaaacttctaaacgtaactgttacttgatggaagtagtgggtgtanaaggggttaatacccactaacttgaaacaaagtcccttctgacacaagtgtctctctatc

SEQ ID NO: 15906 - DNA, 372 bp, Glycine max
agcttttctcttgtggagacggcgacaaatatcggttgggacatggaaacaaggaaacgtaccttcaaccaacttgtgtctctgcacttatcgagtataatttccaccagatagcatgtggacacaccatgactgttgctctcactacatctggtcacattgttactatgggaagcaatgaatatggtcaactatgaaaccatctggctgatggaaaagtacctatcctagtacaagacaagttggtgggtgaatttgttgaggtaatatcatgtggatctcatcatgttgcttgcttgtcatcaagaagtgaattgtatacttgggggacaggtgccaatggaagattgggacatggagacatagaggata

SEQ ID NO: 15907 - DNA, 359 bp, Glycine max
  unsure at all n locations
agcttcccaagttnttaagttcttcctcaaaactgtcctaagcaaagttcccaaagtcctattaacaacttccgtttgcccatcgatttatgggtgacaagtggttgaaaataacaatttagtgcccaacttgctccacaaagtcctccaaaaatggcttaagaacttagagtccctatcactaacaatgctccttggcaaaccatggagtctcacaatctccttgaaaaacaaatcagccacatgggaagcatcatcaacttttttacatggaataaaatgagccattntagaaaacctatcaacaaccacaaaaatggaatctctaccattgctttgttttggcagccccaaaacaa

SEQ ID NO: 15908 - DNA, 398 bp, Glycine max
  unsure at all n locations
tattgctaaatgctaatcaatcagcaattctcacagaaatcatctgttcctgacaatgttagaaaccatcagaccatggccatatataactgtgcaagcatgatagaaaacaaattataaaactattagaaatgaatgaggaagtttgacaaaataataagacaaataccttttcattgtatatacgaagcctttctttgactactgctntagtatcatctgaccgagtaatgagctttgacatacagtgtgcaggaggaagaagtggagccatgaccattccaggacgcccattctcactcttgatgctaatggaggcaatattaaaaattccttcacattgattacaaattcttctaccaagggcatttgcaagcagtgcttcttcttggagcttc

SEQ ID NO: 15909 - DNA, 413 bp, Glycine max
agcttagactcagttcagcctaccatcctcagactgatggccaaactgaacggaccattcagtcgttggaggacattttaagagcatgtgtcttatagcagaagggaagctgggagggttttcttccattgaaagagttcacttataacaacagttttcattctaccattggcatggctccctatgaagctttgtatggtagaaggtgtataacacccctatgttggtagagcccggagaatgcctcaccttacgaccagaagtggtacaacataccactgagaaagttaagttaattcaggacaggatgagaactgctcagagtacgcagaccagttatcatgataagaggatgaaagatctggaattcgacgttggtgatcatgtattcttgagagtcactccatggaatg

SEQ ID NO: 15910 - DNA, 449 bp, Glycine max
  unsure at all n locations
gctattacgtgacactatgatactcagcttatagggagtgatgcctatgctagtgtgataactattattataagctaaatttataagggataaaaacttatcccaacttacaccttcatcaagaacacatactctaagcatgtcttcaaggttctagatgatcctctntgattgactatccatttgaggatgataagcagtgctaaaacttagcttatacccaaaagctcgctagaatgctttccaaaatctaagatacctatctaacactatagaggtaggtatgccatgaagcttaagtatctccttattgtaaatgtctgctaatttgtccaatttgtaggtctccttaattggtaagaagtgagcagacttggttagcctgtccacaaccacccatatgacctctagacccaaacgaagttttggaaaactgttacaaaatccct

SEQ ID NO: 15911 - DNA, 323 bp, Glycine max
  unsure at all n locations
gattcatgggttcgagctatgcatgatgaaattattgctttagaaaggaatcatacatgggtgcttactganttacctcagaataaaaatgtgattgtgtgcaaatgggtgtacaagatcaaacataatgtgaatggctctattgaacggtataaagctcgcttggttactaanggctatacacanattgaaggctangactatttagatactgtttctctagtagccaaaattactaaagttcggcttttgttggcactcgctgctttgataagtggttatcagacagcttatgtaataatgcaaactcatttgatcttatg

SEQ ID NO: 15912 - DNA, 375 bp, Glycine max
  unsure at all n locations
agctttgatgcaacatttggagaggttaatgaaacaacgagatgatgcgctccatgagaggttggatcaaatggagaatagagatcataatgaagaagaaaggagtagaagagggaatgatggtgttcctagacaaaactgaattgatgatattaaactcaacattcctccatttaaaggaaagaatgatccagaggcctacttggagtgggagatgaatatagagcatgttntctcatgcaacaactatgatgaggaacataaggtgaaactngccgtcacggagttttccgactatgttcttgtgtggtggaacaagctacaaaatgagagagcaagatatgaagagccaatggttgatacatggatggagat

SEQ ID NO: 15913 - DNA, 303 bp, Glycine max
  unsure at all n locations
tataatatattgatacgctaganattaaacatcggaagctctcgaganattcacatggtcatgacttttcagacggatgtccgattatggcgaatcacatatcgagacgcttcataattgaacaacagatactctggagaaattcaaatggtcataactgctcacaccgatgtccgattcaggcgaatcacatatctagacgctcaaaattgaacagaggatgctcttcgaaaattcaaatggacataacttttaactcggatgtccgatcacgcgcatcacatatagaagctcttgaaaagg

SEQ ID NO: 15914 - DNA, 298 bp, Glycine max
gatgcaacatccggagaggttaatgaaacaacgagatgatgcgctccatgagatgttggatcaaatggagaatagagatcatactgaagaagagaggatgagaacagggaatgatggtgttcctagacaaaaccgaattgatggtattaaactcaacattcctccatttaaaggaaagaatgatccggaggcctacttggagtgggagatgagaatacagcatgttttctcatgcaacaactatgaggaggaccagaaggtgaagcttgccgccacggagttttccgactatgctctt

SEQ ID NO: 15915 - DNA, 379 bp, Glycine max
  unsure at all n locations
attgaataaacacttaattnttgtctgattgcatcttatgttaatcaaaactatgtctacaaccatgtttctgggtttaatttcacgacaatgtggacccttcaaatgcagaggctatagtaaaaaaattccagatggatggacgttatcttagagatgtctggtaaattctctgattattcatctgtctgggttttggcacccttgctatttggtgtgttaagttcaagattggttgaaggatatttgataccctgctatcatgcgagtttgggacaccaatgatggaaggctgaaatttctttgagaaaacaaatcgttnttgtggacatttgtgtggatntcttatatgtttctcttaatattctctcttatcatg

SEQ ID NO: 15916 - DNA, 360 bp, Glycine max
cttgaaagactaccagaataacatatgctatctggaatcttccttgagaggttgttggtggagaggtccaacacagtgaggttactatgcttccctagctcctcaggaatctcacctgttaatccgttagaccatagctgaagaacctgatgcctatgcaaagatgcaacaccctttggaatcttcccagtgaacttgtttgagaaaaggtggagaatcttcagcctctggagcttaaccacacgctcggaaatctcacccgaaagagagttatcacttagatcaagagacatcatctttttgagctcgaagatagatcctggatttgaccacttatttgttttggagagaagagatctg

SEQ ID NO: 15917 - DNA, 354 bp, Glycine max
  unsure at all n locations
agcttgtgactcttggcaatatctttaacattagtcacttaaaaagttgtgacttttgaaaaaatcttcagaaaaaagtcacttgaagaattgcgactnttggaaaattatttttcgaaatcagtcactggtaatcgattaccattaatgtgtaatcgattacacatcaatagatgtgactcttcattttaaattttgaaaattaaaacatttagaagccttggtaatcaattacaagtattgtgtaattgattataccatgttaaaatgatttgaaaatgtttaaacacaagctgtaactcttgaaatttgaatcttaatgtttaaaacactggtnatcgattactaccttct

SEQ ID NO: 15918 - DNA, 372 bp, Glycine max
agcttgactatgaaagcagaacctgaaatttttgtaggttatagctcaacttcaaaggcctacagaatctacctaccacagagcaacaaagtaatcgtcagcagggatgtcaaatttctggagtcagatagttgggactggaaaaatgattagaggtctgagtttcaggaagagaatgaagatgttgatgaagaacctatcagaggaaccagatcactttcagacatctaccaaaggtgtaatgttgctgtgatggagcctgagggatatgaagaagctacagctgatcaaaaatggagaaatcaatgaaagaggagcttataatgattgaaaaaaataaaacatgggagctggtggacagacctaaccaca

SEQ ID NO: 15919 - DNA, 415 bp, Glycine max
  unsure at all n locations
attacggacctaatagactcagcttgctctcnacaacttggttagctagactagtttcttggtattgaagtcaagtattgtcctgatagatctattatgatgacacatatgaaatacattatggacttgttgcacaaaacaaanataaccgaggctcagcctatctcctctcctatggttcctcctgcaaactctctaagaatggcagtgatctctttcatgatcctaccttatttcattcagttgatgggcactccagaatgccccttgacccacccagagattagctactctgtccacaaggtctgccagtttatggctcaacctttagacactcattggactgctaggaaacatattctgcactatctagagggtactgggtcttatggtcttcacttaacacctgctgctc

SEQ ID NO: 15920 - DNA, 291 bp, Glycine max
  unsure at all n locations
agcttctattctctatacaagaatgaagctctgataccacttgttagacaagtggcctcagatatcttaagaagggggggttgagttaagatatcacaaactatttccncaattaaaattttatgtcactttctattcaagtgataaattcccttaacaatgaatttcttatatattgattcggatagagcaatttgaatatgattgtttaacaatcatcaataaaggagtttaatggaagagagaatgcatactcagaattatactggttcagtcacacccttgtgccta

SEQ ID NO: 15921 - DNA, 342 bp, Glycine max
  unsure at all n locations
agcttggaacatacaatctgaattntaggtcctcttaaggacttagtcaaaatatctgctggctgatcattagaaccaatgaactcagtgacaatctccttggacagaaacttctctcgaatgaaatgacaatcaatctctatgtgcttagtcctttcatgaaaaactgggtttgaggcaatatgaagagcagcctgattatcacaatacaacttcattggcagctcttcacaaaacctcaattcctgcagaaactgtttaatccacatgagctcacaagtaaccatagtcatagatcgatattcagcttctgcactggaccgagcgacaactgtctgtttc

SEQ ID NO: 15922 - DNA, 386 bp, Glycine max
  unsure at all n locations
agcttagcttaaaattaatttanaattcttacaagtattgcaaaaattatctacgaattatggattgaaatcttgtaaattaatgaatccacttttaccaaaatttattgcttcttttcttactctaaatgtttgcataaacttttataatatttacataacctttangtgatatattcaattattcattataattnttttatctagaggatntataacaacaactcatgtacctttatttaactaattgaactanatttcttgacatccattatacatttttataatataaaactaatagcagtaaaaatatattatcaactattcagtaacaattataaactgccttttnngttccctaattntgttttttttaaaaaaatctt

SEQ ID NO: 15923 - DNA, 362 bp, Glycine max
  unsure at all n locations
agcttgtatattaattggcatacgaattcatcttctactgaggtcgcgagtatccaaattcatctcctattgattntgagtataatcccagtacttaaatcttaataatatagtttaaaacataatattcatatttcatctctttaaagttagaagtaatatttaaaattaatagatagagcagttatgtatgtgtgtgtttggttcatgagattagtgtgttatttatccaacattntaatctcttcgatgtttctaaatcantaataattgtctcaactgcatggatgtacttaaaaacatatttgttatattataatatcaacaatattaacatatataattgagaattaaacaattta

SEQ ID NO: 15924 - DNA, 397 bp, Glycine max
  unsure at all n locations
agcttgtgacttgcataaactccttttcagtggatgacaatagaagctaaaagttaccaagcatacatcaaactgtttcaaaaagtccaactatcattttattcttaataaatgggagttaccagtataaaataaactatggctgcaaaattgtacttcaaaaaaatataaaatataacctgatcaaagacatcaatatagactttgtgcagagaatgagaactgcagaactgattaatctcatgatgaatcttgtcatatatccatgtcttatcataatgtacaccatagttgagcaatgtctcaaagacaaattccttatggagttgattcacaacctanaagaagaatatgcatcactgctatgaaaatattgaagatgtgaaaagaaaacact

SEQ ID NO: 15925 - DNA, 416 bp, Glycine max
  unsure at all n locations
agctntgatgcttgtgttgaatgcattaaaggtaaacagaccaaaagcaataaattaagtgcatatagggctactgacatcttggaattgatacatacggacatttgtggaccatttcatacacctttgtggaatggtcaacaatattttatatcattcatagaagattactccagatatgcatacttgtttcttatacagganaattcacaatctttggatgtgttcaaaacatttaaagttgaagttgaaaatcaactcaacaaaagaataaagtgtgtcagatctgaccgtggtggtgaatactatggcagatatgatggttcaagtgaacaacgtccggngccttntgccaggtacctagaggaatgtggaatcatcctacagtacaccatgtcggngtcacctagcatgaa

SEQ ID NO: 15926 - DNA, 395 bp, Glycine max
  unsure at all n locations
agctnttgctacattagcttctttgcaataaacgtgcattaaagtagtgaaggtagcaacagttggaatgatttgcatctcaagcatcaaatcaagaacccaaatagcattttcaatcttctttgaatttgcaagccctctaacaatagcgctcatagcaacattgtgggagctgataccaagtgttttcatttcatcttgcagtttcattgctccttttatgtttccaactctacacatgccattgattaaagtgatatattgtttatttgtaggaacagaaccactttccaacaagacttgcaaaacacgatgggccttatgaaaatcactagttctaatgagtccattaaaaaggcattgtatgtatctacattangaataaccataaactg

SEQ ID NO: 15927 - DNA, 348 bp, Glycine max
  unsure at all n locations
agctttgatggtggaggatagacgaacagcgctaggcaatcaaatcatgggtctccgaataagattttatgtttgaggatagatgaatagtgctaggcaatcaattcatgggactccgaataagatttgagggtggacgataaacgaacaacgctaggcaaccaattcgtggtgctccatactcaatggtggaggacgcatgaacaaaactagggaataaattgatgggtctccgaataagatntgagggtggaggatagacgaacaactctaggcaatcaatccatggggttctagactcgatggtggagaacgcatgaacagcgctaggcaatcaagtcatgggtc

SEQ ID NO: 15928 - DNA, 371 bp, Glycine max
agcttgaacattatctccttttgggttcgcaggttcttccatgcacggaatccagtgatcatctcgattacaatgcacccaagagaccatatatctaacgctggttcaatctgaccaacgatcgattctggcgacatgtaaaaaggtgtccctctaaacttgaccttcccatactcagcatttgcatcttctctagtcttggacaacccaaaatcagcaatcttcagttgataccttgcatgatcatcagatgaaggaaagagaaggatgttgtccggtttgagatcacaatggacgactccttttcgatgaatgcaagaaagccctttgagaagcatacgagtgtagactcttacttcactatccgatat

SEQ ID NO: 15929 - DNA, 456 bp, Glycine max
  unsure at all n locations
ngcaattaacatgaatggccttcctaatattacaggaatgtcagtatcttcacaaatatccattaccacatagtctatcgggaagataaaatgtttcactctaaccagcacatcttcaattactccatatggtctggtaatggagcggtcagcaagttgtaaagtcatcttagtgggcatgatctccaactctcccaaccttntgcacatggagagtggcattaaattaatactggctcccaggtcaataagagcctttcacacagtgacttctccaattgaacaaggaatagttacactcccagggtcttgatgcttgngtggaaggatcttttgaatcacaacactacaatttccttccactatgatattttcctggtgaatatacttatgtttccttgttaacatatccttcaagaacttggagtagagtggcatctgctgtaaagcttctcc

SEQ ID NO: 15930 - DNA, 435 bp, Glycine max
  unsure at all n locations
ntagagagctgcgcttcttcattgccttcaaatttctgtctgtatctgattcatcaccaggttttccaggagagaagactttgagaagcccttgaaccaggcttggtgcaaagtccttgtacctttgatgaagcaaagaacagatctttccaaaaagaagcaaatgatttaaggtaacatcatataaaatatagaaacagcttcaaatgtgtagaaaccagggggactgcaaagcccatacctgaactgcagcttgtatatcagaacttctaagcttggcatcacatatagcagccacagcttcactgacaaatntgcttaagttgacacttcgcaactcgtccatcagagcttcacgctgctcttcattaatctgcttcagtttcttaataacagcagtggtgcgcttaatgctagaatccaatgtcccttaaa

SEQ ID NO: 15931 - DNA, 279 bp, Glycine max
  unsure at all n locations
agcttcggttgttcaatttcgagcgtctcgatatattatgtgcctgaatcggacatccaagtgaaaagttatgatcatttgaatatctcaagagcttccattgttgaatttcgaacgtctcgatatattatgcgcctgaatcggacatccgagtgaaaagttatgaccatttgaattgctgaagatctttcattgttcaatttcgaacgtctcgaaatattatgcgcctgaatcggacatccgaagttaaagtatgaccatntgaattgtcgacagctt

SEQ ID NO: 15932 - DNA, 400 bp, Glycine max
  unsure at all n locations
ntcgagaaattcanatggtcataacttttcacacggaggtctgattcaggcacataatatattgagacgctcgaaattgaacaacggaagctctcgagaaattcgaaaggtcataacttttaactcggatgtctgattcaagcgcataatatatcgacacgttcgaaattgaacaatggaagctcttgagaaattcaaatggtcataacttttcactcggaggtcccattcaggtgcatcatatatcgagatgctcgaaaatgaacaatggatgctgtcgagaaattcaaatgatcataanctttcacttcgaggtccgattcaggctcatcatatatcgagacgctcgaaattgaacaccgaagggtgtcgagaaattcaaaaggtcataacttttaac

SEQ ID NO: 15933 - DNA, 341 bp, Glycine max
agcttctagtctcaattttgagcgtctcgatatattacccgattcaatcggacatccgagtaaaaagttattgtcttttgaatttcctacaagcttccgttttcaatttgcaacgtctcgaatatattacaggactcaacttgacatccgtgtataaagttattgtcaattcaattttctcagaacttcggatctaaattttgagcgtttcgatatattacaggactcaatcggacatccgagtgaaaagttattgacacttgaatttgatacgagcttccagtttcaatttggagcatctctcgataaattacgacactctgtcaggcatccgagtaaaa

SEQ ID NO: 15934 - DNA, 322 bp, Glycine max
  unsure at all n locations
agctntgatttcctttgttccggaaacctttcttttctcatgtgcacccaaacccaatctccgggttcgaagacaaccttctttctccctttgttggcttgtttagcatagcttttatttttcctctcaattttatctttgactctctcatgaagcgtcttcacatagtccgcctttgcttgaccttctttatgcttaaaaatagaaacattaggcataggcaaaagatcaagaggagttagtgggttataaccataaacaacttcanaaggagaacaattagtggtgctatgaacagctctattgtaagccaattcaacat

SEQ ID NO: 15935 - DNA, 331 bp, Glycine max
  unsure at all n locations
acttggaccccatttctaccaactacaaaccctaagaaaactatattatctacacaaaaggtacacttctctatatttgcatagagggtgtttttcctaactactgaaagaactagcttgagatgtcctaaatgatcatctaagctcctactgtatactaaaatatcatcaaaataaacaactaccaatctacctatgaaatcccttaagacattatgcataagcctcataaaagtgcttggtgcattagtgagcccanaaagcatcactagccattcatacaaaccaaacttggtcttgaaagcggatntccactcatcaccctttttca

SEQ ID NO: 15936 - DNA, 126 bp, Glycine max
  unsure at all n locations
ccacagattctgccttcttctattttcagagtggggatgcctctaacagcacctctgtcaatgattntcttcatgcctcttaagtgcagatgtccaaatctttgatgccatattctgacttcatct

SEQ ID NO: 15937 - DNA, 374 bp, Glycine max
  unsure at all n locations
tgatcatgtcatcaattcgaagatggttattcagcttcttttcaaactgngaaaaaaataaaacttatagctcagacagctgtataagaaagaagctatatcttgaagtcaacaactgttgatatttaactaaatacatacctgaataatttttactttgctcattgcaggctcaatgactccggcctccaagttgtttctgattatcccttgcgaaaggtccaaacccatactggggaaaaaagagaaaaataataacaatatttagcgagatggaaaagaatgccaaagcttatcaagcatcatttcatatgtattctccattggtacttttctctaatattcattaacatattcacatgttggaatgatac

SEQ ID NO: 15938 - DNA, 420 bp, Glycine max
  unsure at all n locations
tattatcatacaaaaacttttaacagttacaacttttaatatttgattttaaaatcttcaaaatagtttggcacagatagaataatcataatcagttaggatgctccatcacaattaanaaagaagacttaatggatggagcaacgtgaataacaacaaattataaattcaaagatgtgtttttttgtttcattaaattagttacaatagtacacttaaaaaaaaagttacaatagtgactaaataccgccaaatttaaggatcaaaatgttagcttactcattttcttgataaaaatcgttgacttttaaattgaataaaatattaaattaatggaagaatntgttaaatntgtttgaatttggattatctttacaatagtgattaatataaaatcaagattttataacaatgttttac

SEQ ID NO: 15939 - DNA, 452 bp, Glycine max
  unsure at all n locations
tcttacatagtccgctnttgctggacctttatgcttaaaaatagaaacattatgcatagacaaaagatcaagatgagttagtaggttaaaaccataaacaacttcaaaaggagaacaattagtagtgctatgaacaactctattgtaagcaaactcaacatgtggtaaacaagcttcccaagtctttaagttcttcctcaaaactgtcctaagcaaagttcccaatgtcctattaacaacttctgtttgcctatcagtttgtgggtgacaagtggttgaaaataacaatttagtgcccaacttgccccacaaagtcctgcaaaaatggcttaagaacttagagtccctatcactaacaatgctccttggcaaaccatggagtctcacaatctccntgaaaaacaaatcagccacatgggaagcatcatcaactnttntacatggaataaaat

SEQ ID NO: 15940 - DNA, 259 bp, Glycine max
  unsure at all n locations
tgaatagttcgttcaatctgaccatctgtntgaggatgataagctgaactaagcttcagctttgttcccaaagcttcatgtagacttgtccaaaatcgcgaagtgaaccttggatccctgtcagatacaatactagaaggaatttcatgcaaccttactactttcttgatatacaactccacgtagctttccattctatacctcatattcactgcgataaaatgagcagatttggtgagtcgatctactatgacccaca

SEQ ID NO: 15941 - DNA, 411 bp, Glycine max
  unsure at all n locations
taacatcagaccacttccagggtgctagaactacttcacatggactngatggggcctatgcaagttgaaagccttggaggaaaaaggtatgcctatgttgttgtggatgatntctccagatttacctgcgtcaactttatcagagaaaaatcagacacctttgaagtattcaaggagttgagtctaagacttcaaagagaaaaagactgtgtcatcaagagaatcaggagtgaccatggcagagagtntgaaaacagcaggttcactgaattctgcacatctgaaggcatcactcatgagttctctgcagccattacaccacaacaaaatggtatagttgaaaggaaaaacaggactttgcaagaagctgctaaggtcatgctccatgccanagaacttccctataatctc

SEQ ID NO: 15942 - DNA, 349 bp, Glycine max
tcagcaccactcttaacatttctgatctaactccttttgcaagtggagctgatattgaggaggaggaactaacacatttgagggtcaatcctcttcaacgggaaggggatgatgcaatcctccctaggaagggaccaatcactagaaccatgagcaagaggctccaagaagattgggctacagctgctgaagaatgccatatggttctcatgaaccttaaggtagatttttgaacccatggaccaatgatgggtacaattatctttgtacatattagactacgaattcattatactcggtccttgtatatatggctccatattgcaagtatggtgccctaaaatatatg

SEQ ID NO: 15943 - DNA, 450 bp, Glycine max
  unsure at all n locations
tctttganagaaaatggaggagaaagtattttaatagcatgtggacgtggaagaggacgtggtcgtggccaatgaagaggaggaagaggagatcgtgataattttgacaataatgaatggaggagccatcaatccactanaagttgtggaagaggaagagaaagaggtagaaacaattatgataaagcatatgaaaggaggtatgataaatctaatgttgaatgttttaattgtcataaatatggccattactcttgggagtgtagaacaaatgttgaagagaaggtcaatcttgttgatgataaagaagataaagaagttgaagagccagcactactactatcnacttataatggtgagaaggaagacaaatgcttatggtatcttgacaatggagcaagcaatcacatgtgtggatgcaaagagaaatntgtggaacttgatgagaat

SEQ ID NO: 15944 - DNA, 316 bp, Glycine max
  unsure at all n locations
gacttttccatatacacctgaacaatatggtacacctgaaagaaagcatagacattggacaaaaactggtctcactcttgtggcttcagcttctctttcttgaaatttttggggagagtcattcaacactgcagctactataatcaattatcttccttcacctgcccttaacaatatgagtccttttgaaaaattgtttcataaanaaccagattataaagtcttgagagtgtttggatgtgtntgtatcctctattacgaccttattaataacacaaacttgactttcggcacacatgtgcctattcattggtat

SEQ ID NO: 15945 - DNA, 421 bp, Glycine max
  unsure at all n locations
tcttccctttcccatgaccggcattgtcaaagatcctacacatgttggtcaggtgtacaaagttatggataccatgacaattcaccatcatcttcacttctagttggaggccattgataaacttcacacatttagacctctccctagcttccccctgataatgaggaaaataccttaccaggttctcaaacctagctgcatactctgccaccgacatgctcccctctttcgactctaagaactccatctctttcctatntttcacgtcttctggaaaatacttctctagaaaagtgtgtctgaaagtccccgatgggacaatagcaccacctgctccctccaaacgtggacgagtgttctcccaccagtactctgcctcatctgccagcatgtgattagaaaacaacacctttttctagtc

SEQ ID NO: 15946 - DNA, 427 bp, Glycine max
  unsure at all n locations
tattcaaaatacagggcatcctagccttatataagcagatgtttaaacagaananaaaataacagaataaactttcatatggattntagtcacagcccaacaattcaccaccttgaactaacattcatataagacacaaactgcaccctccaagcatacacgaactcaaccctaacaatcaacattgagcaagcttaagcagtgatcaaacttgctctttggaactggctttgtgaacatatcagcaagattgtgcagagtgttgatcttatgaactttgattcttctttctgaccgaatgaagtgatatctaacatctatatgcttggttctatcatgataaacctgatccttggccaagcatatagcactaaggctatcacagtagatgttagcatattcttgattaattccgagatcatttatt

SEQ ID NO: 15947 - DNA, 397 bp, Glycine max
  unsure at all n locations
ntgatttcctttgttccggaaacctttcttttctcatgtgcttccaaacccaatctccgggttcgaagacaaccttctttctccctttgttggcttggttagcatagcttttatttttcctctcaatttgatctttgactctctcatgaagcttcttcacatagtccgcctttgcttgaccttctttatgcttaaaaacagaaacattaggcataggcaaaagatcaagaggagttagtgggttaaaaccataaacaacttcaaaaggagaacaattagtggtgctatgaacagctctattgtaagcaaattcaacatggggtaaacaagcttcccaagtttttaagttcttcctcaaaactgtcctaagcaaagttcccaaagtcctattaacaac

SEQ ID NO: 15948 - DNA, 415 bp, Glycine max
  unsure at all n locations
tgactgcgcttagaatatccaaagaaaattccttcatctgtttttcatcaaattttcctaagtcttcttttccattgtttattacaaaacatttgctaccaaaaacatgaagatgtgaaatgtttggttttcaaccattgaacaatttatatggggttttctttaaaatgggtcttattaaagccctattcatgatatagcatgcagtattaacggcttcagctcaaaaatattttggaagaggggtatcatttaataaggttctagcaatttcttccaaagacctatnttttctttcaataactccattttgttgaagggttctatgtgcagaanagttatgttcaatgccatgcttttcacaagataaatcatattctttattttcaaactcacccccatgatcactcctaat

SEQ ID NO: 15949 - DNA, 366 bp, Glycine max
ttctggttgttcctggtgccgagatgatggtacagcgggtgaaccaagggctgaagtttcttttggtgaggtagccatggaaaagcagagcgtttggaatggtttatccaatttctgagaactgttgggggatgctgaaaacgagattatcacgaatatataaatttgaatgaggaatgtaaagggccgtgtgaaacaacggtcgaatttgctttggttcagtagtgaacgtgctattaatgttatgtgattcgtttgggcacgttcagatatcagtagttgctacaatttctctagcagaacaatgcccaacttgccccttcagttttcaaactggtttgcatccaatgcctttgtgaaaatatc

SEQ ID NO: 15950 - DNA, 445 bp, Glycine max
  unsure at all n locations
tctttgacatataatggacgagaaagtagtcaaaaagcatgttgacgtggaagatgacgtggtcgtggccaaggaagattatgaagaggagatcgtgataattntgacaataatgaatggaggagccatcaatccactagaagttgtggaagaggaagagaaagaggtagaaacaattatgaaaaagcatatgaaaggaggtatgataaatctaatgttgaatgttttaattgtcataaatatggccattactcttgggagtgtagaacaaatgttgaagagaatgtcaatcttgttgatgataaagaagataaagaagttgaagagccagcactactactatcacttaataatggtgagaaagaagacaaatgcttatggtatcttgactatggagcaagcaatcacatgtgtggatgcaaagagaaatttgtggaacttgatg

SEQ ID NO: 15951 - DNA, 269 bp, Glycine max
  unsure at all n locations
agcttctcagctatcttgcttcctcactagcagntgctagtgctatcatctcacattccatagtggactgagctaagatagtctttttctttgacttccaagagacagccccaccagctatgctaaatatatagccgctgggtgctttggaatcatctgaaagagtgttctaatctgcatcgctgtatccttcaagtacagcgggaaaccctttataatgtaatccaaaggctatggttctattaaagtgcctcattaccctttcaata

SEQ ID NO: 15952 - DNA, 233 bp, Glycine max
  unsure at all n locations
catcaaaggtaattgaaaacttgggaagaatggttacctcatgttgaattatcttataatanggtagccaacactaccacttctttttcctactttgagcttgtttatggttntgatcctctatcttctcttgatttaactcctttacctaatgattcttctattttgagtaaagatgggatttctagagccactcttgttaaggatcttcatgaatgggtgagaaatcaaat

SEQ ID NO: 15953 - DNA, 261 bp, Glycine max
  unsure at all n locations
agcttctcatttgtacggngactcttcactggtgatccaccagctgatatgagaatgggaaactanagaccccaagctgataccctaccaagcctatatcaaggaatagtgctggttctttgatgagatctccttccatcatgttccccgagaggaaaatcatattgcaaatgcgcttgccactttggcatccatgtttcagctaacaccgcacagggacctaccatacattgagttctggtgtcgtggcagacccgcaca

SEQ ID NO: 15954 - DNA, 288 bp, Glycine max
agctacaacattttaccacttccagggtgctggaactacttctcatggacttgatggggcctatgcgagttgattgccttggacgaaagatgtatgcctatgttgctgtggatgatatcaacagatttacctgagtctactttatcatagaataatcatacacctttgaagtactcgatgagttgagtctgagacttcacagagaataacactgtgtcatctatagaatcaggattgaccatagctgatattctgaaaacagcatggtttctgaattctgcgcatctg

SEQ ID NO: 15955 - DNA, 273 bp, Glycine max
  unsure at all n locations
agctngaatgatgtatagatccttgattcttcaatggccaccacaatgtgatcaaactttgatatcaatgttctaagcaccttttcaatcaccaattgttccttaatttgttctccacaacacttcatctggttggtgagtgtgagaatcttggtgagatactcaactactgattcagtctcctccattgcaagaagctcatactatcttctcaatgtctgaagtntcaccttctttatcttttctgcaacttcatgactctttacaagaatg

SEQ ID NO: 15956 - DNA, 292 bp, Glycine max
  unsure at all n locations
ttttttcacttcatacatctttttcttctgaaaatatatttgaaaattntaacaacattaatttaagtattcatattaatatagtattggttaaaaaattaaataaacattgatttgaatgcaatttacaaattattagatatattatcaatccttaaaccaaataaaatataaattaaactacattatactatgatatatnncaataattctattaatattgatcactattgctaacaatngatttactgctatatatttgatattgataccatataatactaattaccta

SEQ ID NO: 15957 - DNA, 270 bp, Glycine max
  unsure at all n locations
agcttgaatgaccatttgatagccatgttggacatgccaaagggtgccataagtaggtagttttgcttttgaatttttagacagaaatggataaagtagagggacaaatagtccattttgaaaaaacttattgtcaacctctttcagatatgaatatacctgattcagaagggaagaacttgcatcaatatctcaatttcaattgaaacatgggtttgattcacactccatgttctgagaaatatntaccatccaaanaaaggagagata

SEQ ID NO: 15958 - DNA, 269 bp, Glycine max
  unsure at all n locations
agctntgaatgcactattcaatggagttgacaagaacatcttcagactgatcaacacttgcacagtggccaaagatgcatgggagatcctgaaaatcactcatgaaggaacctccaaagtgaagatgtccagattgcaactcttggctacaaaattcgaaaatctgaagatgaatgaggaagagtgtattcatgacttccacatgaacattcttgaaattgccaatgcttgcactgncttgggagagagggatacagatgataagctgg

SEQ ID NO: 15959 - DNA, 300 bp, Glycine max
  unsure at all n locations
agcttctaaactttatacaagaatgaagctctgataccacttgttagacaagtggcctcagatatcttaagaagggggggttgaattaagatattccaaattacttccccaattaaaaatctatttcactttctactcaagttataaatntccttaacaatgaacttcttaaatattaattcaaataaaaacaatttgaatataaatataaagcaataataaacaaaggagtttaagggaagagaaagtgcaaactcagaattatacctggttcggccaaacccttgtgcctacgtcaag

SEQ ID NO: 15960 - DNA, 351 bp, Glycine max
agctatggttttcggaaatctacactccctgttgtcttttggggaccagtttctcatgaacaggggcttgaccaggaatcatttgtatgggttggatatggaattcaggttgttcctggtttgatggtgctttggtggatgatggagatgatggtacagagggtgaaccaggagctgaagtttcttttggtgaagtagccatggagaagcacagcttttggagtggtttcgtgaatatctgagaagtgttgaggaatgctgatgataaccagattgccactaaaatatgagtttgaatgatgaatgtagatggacgtgtgaagcaacggtcgaatttgtgtttgcccagta

SEQ ID NO: 15961 - DNA, 409 bp, Glycine max
ctcagcttcacaagcaagcttccatcactttctctccctctccctccactcatcttctcctaccttcaagctcttacccatggcttcctatgttggtgagctttttcttgactcatcttttccttgaagtggcgtctccaatcatctttcttccatctccattctgctaccgttaaacttcaagaagcaagggactccattgatgaagatgatccaaggcctatatgctccacattgagttacattacgaaaaatacttgtttgaaaatgtaaacaattacaaaacatattatatatatttatatattttaaattacacacacacacacatattcaagttttacttaaactaaaaaatacttaaataatgtatgtggttactagaatatatttacaaactaactaattc

SEQ ID NO: 15962 - DNA, 364 bp, Glycine max
ttagatgttaggtgatgcaatcctactttgcaaggtcattggatagaaaactccaagttgattgggccttagattcaagatagagcccttaggtacttataaccttatggtaaatttctggcccatggtctaagtatgaacccacttatgtttgcaaatattatataaaagcttcattattcttgggccttgtatttacggctccctaatgtatgtacggtaccctaaatatataagattcttcagcccttgtgtttaagggcacctaaactagtttttgtattaggggtatgttagtaattccacatgcactaagtggatatttgatgtgtgtggaatgaaattaaattaattgagttggttc

SEQ ID NO: 15963 - DNA, 384 bp, Glycine max
tcaacattcaatttcgagggtctcgatatattactgtactcaatcggacatccgagaaaaaagttattgtcatttgtatttgctcagagcatcaacattcaatttcgagcgtgtcgatatattacgggactcaatcggacatccgagtaaaaagttattgtcgtttgaatttgctcagagcttccgtattcaatttcaagcgtctcgatatattacaggactcaatcagacatccgagtaaaaagttattgtcgtttgaatttgctcagagctttgggattcaatttcgagcgtgtcaatatattacaggactcaatcagacattcgagtaaaaagttattgtcgtttgaacttgctcagagcttccgcattcaatttcgagcg

SEQ ID NO: 15964 - DNA, 405 bp, Glycine max
gaccttagaatctcagctcacatcagacccttccgggtgctggaactacttcacatggacttgatggggcctatgcaagttgaaagccttggaggaaagaggtatgcctatgtgggtgtggatgatttctccagatttacctgggtcaactttatcagagagaaatcagacacctttgcaactgtcaagcacttccacatctttggaagtccatgttacattttggcagatagagagcaaaggagaaagatggatcccaagagtgatgcaggaatattcctgggatactctacaaacagcagagcatatagagtattcaattccagaaccagaacagtgatggaatccatcaatgtggttgttgatgatctgtctccagcaagaaagaaggatgtcgaagaagat

SEQ ID NO: 15965 - DNA, 361 bp, Glycine max
agcttgttgcttatgttgaaaagcacgaccacggaaactggcattcagtgcctgccaaagcgggtaataaaacttttttgtattcctttttactcaatctatgaattgaggttttaaattgcggttgcaaatacattttagatttgtgatgatccttgatattgtgggacattgtagacaaatgcagtcgatcgataaggttgcaattgtagttgcaatgtgaatgcagatattcctaattttgtttgttacatacatttatatctaggtcttcaaagatgtggaaagagttgcatgctgaggtggatcaattacctcaagccagatataaaaagaggaaactttatcatggatgaagacc

SEQ ID NO: 15966 - DNA, 349 bp, Glycine max
atcttgttgcttatgttgaaaagcactaccacggaaactggcattcagtgcctgacaaagcgggtaataaaacttttttgtattcctttttactcaatctatgaattgaggttttaaattgcggttgcaaatacattctagatttgtgatgatccttgatattgtgggacattgtacacaaatgcagtcgatcgataaagtagcaattgtagctgcaatgtgaatgcacatattcctaattgtgcttgccacatacatttatatctagggctgtaaagatgtggaaagagttgcatgctgaggtggatcaattacctcaagccagatatataaagacgaaacttcatca

SEQ ID NO: 15967 - DNA, 352 bp, Glycine max
cttcaacttctgaccacttccagggtgctggaactacttcacatggatttgatggggcctatgctagttgaaagccttggaggaaagaggtatgcctatgttgttgtggatgatttctccagatttacctgggtaaactttatcagagagaaatcagaaacctttgaagtattcaaagagttgagtctaagacttcaaagagagaaagactgtgtcatcaagagaatcaagagtgaccatggcatagaatttgaaaacagcaggttcactgaattctgcacatctgaaggcatcactcatgagttctctgcagccattacaccacaacagaatgggatagttgagaggaaaa

SEQ ID NO: 15968 - DNA, 398 bp, Glycine max
taaacattcaatttcgaggctctcgatatattactttacttaatcaagcatcccaaaaaaaagttattgtcgtttgaatttgctcacagattcaacattcaatttcgagcgtctcgatatattacgggactcaatcaaacatccgagtaaaaagttattgtcgtttgaattggctccgagcttcaacattcaatttcgagcgtctcgatatgttacgagactcaatcagacatccgagtaaaaagctattgtcgtttgaatttgctcagagattcaacattgaatttcgagggtctcgatatcttacgggactcaatcagacatccgagtgaatagttattgtcgtttgaattggctcagagcttcaacattcaatttcgagggtctcgatatattac

SEQ ID NO: 15969 - DNA, 352 bp, Glycine max
  unsure at all n locations
ctttatgcaagtcaattttcaggaggtatctcggagaggatcttttccgggcatatttgcgcaaaatctcttgaactaggaagatgttgtccatcatctttctgttcttaatgaaaccagtttgagtttctccaataatagtctcaagcactagggctatgcgattgaccaaaattttagacacaatcttgtataacaaattacagcaagatatgggtctaaaatggttaacctgngaggcctgatcatgcttatgaataagcgcaataatagcatggttgagctgctttagaatttttctagttgtatagaattcattaaccgctgcaaatatatcatcaccaatgatatt

SEQ ID NO: 15970 - DNA, 431 bp, Glycine max
agcttgcgagttcaattacgagtgcctgtatattgatgcgcctgaatcggacatacgagggaaaagttatgaccatttgaatttctcgagagcttcctatgtttaatttggagcgtctcgatatattatacgcctgaatcgaacctcagcgttgaaagttatgaccatttgaatttctttagagcatccgatgttcattttcgagcgtctctatatgtgatgaaccttaatcggacctccgtgtgaaaagttatgaccatttgaatttctagagagcttacgttgttcaatttcgagcgtctcgacatattatgcgcccgaatcggacatccctgggaaacgctatgactatttgaatttctcgagagcttccgttgtgcaatttcgagcgtttgaacatattgtgcgcccgattcggacatccaggggaa

SEQ ID NO: 15971 - DNA, 348 bp, Glycine max
  unsure at all n locations
atcttctcgagaaattcgaatggttataacttttcacacaaatgtccgattcggggacataactcatctagacgctcgaaattgaacaacgcaagctctcgagaaattccaatggtcataacatttcgcacaaatgtccaattctgggacataatatatcaagacgctcgaaaatgtattacggaagctcttgggaaattcaaatggccataatttttcacatggatgtccgatttgggaaaataatatatcgagatgctcntaattgaacaacgaaagctatcgagaaatccgaatggtccgaacttttcgcacggatgtccgattcggggacataactcatctaga

SEQ ID NO: 15972 - DNA, 312 bp, Glycine max
agctttgctatgtataacaatctcacctctatactgggaggaaccagtggtctcttccctttcaactctctagttaagaagtccagtttcttttcttcatcccattcactgtacgtgcccatatccaaataccttgtaattacatcaatggtttcagcatgtctgcttgattcctgtcacactgctagtttcaggccacaactgattatccaaacaataatgaacaaaaaactttgaaacatacctgacgcaagtcaagcttcattaacaccatgccaaaagtagcaactcttcgatcagatcagctagtcg

SEQ ID NO: 15973 - DNA, 389 bp, Glycine max
ttaaaagattggctaagattttgttaacacataatcacttagactatgaaggagagctggagttgctgcacatgatgtccaacgttatatcaaggaatgagatcgggctgcacaatgctcaacgctagatgaactgtcacatgaagtattgaagctgcacgatccacgatgtctaatacaatgtcctgacatgctgcccgataatactggacttgctgctcaatgcaagatataagtcaagtgctgaactgaagttgcatgatccacgacgtctgatacaatgtcctgacatactgcccgaaaatactggagtcgctgttcaatgcatgattacagtcgagtgcaaaattgatgctgcatgatccacgatgtcagacaccatgtcctga

SEQ ID NO: 15974 - DNA, 394 bp, Glycine max
tagcaaattagaatatttatacctttctggaaacttcctagtgggccagttgccatcatcattgtttgggctaactaagcttagtgatttagattgttccgacaataaattagttggcccaatgccagacaaaattagtggactttaatttctaatttaatttatctggatttgtctggtaactccctgcacgaaacaatccccatttatctggatttgtctgggaactccctgcacgaaacaattccccaatggtgcttttctttgtcatcgttgttacgcttatctctttacggaaatcagcttacaggaccaattggtgaattctcttctttttccttgtattattgtgatctctcttataacaagctacaaggtaatatcccaactcaat

SEQ ID NO: 15975 - DNA, 314 bp, Glycine max
atctttctgcctgcttgtacctgcaatttgatttagatgaatatccagacaatgatgcatctatataggccacatgtcaatatccattacctgcacataattccgctcacatatgttgttaatatgaacaggaatcgatgcatctgttcctattccattcttctccatcagggatatcagctcactttcagtaaggaaatctggaggactggtgctcccctgcagaatttgtggtgttagctatgtgtaatacacacagaactccaatgggaaatgaatttcaaccttatttcttctccccagaaatggttata

SEQ ID NO: 15976 - DNA, 397 bp, Glycine max
  unsure at all n locations
tgtgcaatgtctgaaattgcgagtatttangaatatgaaaataagcagaattaagaatcgatgtataacgtcacggggttgaatgaataaactgaattaatattataaaatttggttttgtacttttattgtctacataaaattacaacaccaaatttttagaggatgcgatgtaaagaagtttttgaattttgatggacgatgtaaagaagtttgttttattaagttgttgaaactcaaatgtttgcattgtaaaaattgtcaaaactcattgttattaaacttttacttaaattacttggtaaacgaaaatgtataaatggttaattgtttccttaataacgaaattctatttgttaaatttaatagtatatttattgaaggaaattgtattact

SEQ ID NO: 15977 - DNA, 347 bp, Glycine max
agcttctatagaaggttcgttcctaatttctctacaattgcatcacctctcaatgagctagtgaagaagaatgtggcatttacctagggtgaaaaacaagagcaagcctttgctttgctaaaaaagaaggctctctaaggcacctgttctagctcttcctaacttttctaaaacttttgagctagaatgtgatgcctctggagtgggagttggagctgttttgttacaaggtgggcaccctattgcttattttagtgaaaaacttcatggtgccacccttaactaccctacctatgataaagagctttatgccttaataagagcactccgaacttgggaacattacc

SEQ ID NO: 15978 - DNA, 389 bp, Glycine max
ttcatgacttgcaatctttctatagaatggtgacttatacgaaaatgccacaaatctatagggatgacattacattttggatgggtaatggcggagcatatggatcttgaatgtgatggtttcaaggtaagctgataaagcccatgactcacttcaactgtaccaatcttcgctttggtgttgatatcctgcaaaacacaagtattagaggagaagattaactcgtagctgtttgtggaaatgagtttggatatggatatgagattaaagctaaaagaaggtatgtatagaacatctttcaatgtaattgaagaggtgagatggacggttcccgagtgggtggcatgaacttcgtgtccatttggtaacttaactagaatgggtttaat

SEQ ID NO: 15979 - DNA, 400 bp, Glycine max
tctgtaatcgattaccagaagcaaaaatgactttgaaaagctttcaaaaagtttgaattttaattttaaaagatgtaatcgattaccactattgtgtaatcgattaccagtgacagaaggttttgaaattcaaactgaaaagacatgactcctcaaaaattaattgtgtaatagattaccacagatctgtaatcgattagcagtgagaaaatttcaaaaataactctgaaaagtcacatctcttcataagtttttgaaaagccaccaaaggcctataaatatgtgacttgtgttcgaaattctggagagttttttagaacctcattgtcttattctctcataagaaaaccttgggccacacactttcaaaacaattaaggattcatataagttcttcaag

SEQ ID NO: 15980 - DNA, 400 bp, Glycine max
tgtaatcgattacacacatacagtaatcgattactttagcacattttcaaaaaatattctcaacagtcacatctttttatgtggttcttgaatggctatcaaaggcctatatatatatgtgacttgagacacgaatttaagaagagtttttggagaacaaaaaggtcttatcctattaaaaagcaaatcgtgttatcctcttacaaattccttggccaaattacttgtgattcaataaggaattatttgagtgctcaaattgttcagtctatctctttcaagagagatttcttcttttcttcttcttcattctgaaaagggattaagagaccgagggtctcctgttgtgaaagaattctaaacacaaaggaagggttgtccttgtgtgtttagaacttgt

SEQ ID NO: 15981 - DNA, 363 bp, Glycine max
agcttgagagggttatggaccgaacgatagaatgtcttatccaaaataaactgtatgtagatagctgaagtcttctttttggctcagaacgatcaattgctgtgataagtcccttaactcctgcctgacaaagatcttgaaacctccggccacttgcaaaatcttgaaaatatttgctaatcacgaacaacacaagccggagattgtgctgcaaccgacatcacaatggtttcttaatctcagtataactaatactcattccaaagaatatcaacaaacactgcaacaattaaaccattcatatccaaagagacaaagagagagaagaaatatgaacggagatgtcatatatcactgatcttc

SEQ ID NO: 15982 - DNA, 398 bp, Glycine max
tatcagaaggggaatggtaaaataccacctcaagctgatattattaaggtggcaaagtgtttcttttgcaagaagaagggacacatgaaaaagaattgccccgggttccagaaatggcttgagaagaaaggtaaatcaatctcattagtatgttatgaatctaatatggttagtgttaatattaacacctggtggattgattctggatctactattcatattgcaaattctttacagggtatgcaaaacctaaggaaaccagtgggaagtgagcaaagcattttatcaggcaataagctaggctcacatgtggaggccattggaacttgcattttgactttaagtagtggctttatttcaaaattagaaaggactttttatgtaccaagtttttcccg

SEQ ID NO: 15983 - DNA, 368 bp, Glycine max
agctttgagaagtagtctattgcttttctctcatagccattcatggcaagtgatattataatgaagttccaacatgataatcctgttgttgtgggtgatgcccgaaacacttgaataccctttacgatagctccacacttgcagtacatgtcaataattattgtgagaacaacgacattcaactcaaaattcccctttttacataatcatgaacccactccccatgttgaagtgcacctaagtgagcataaacacttaacaaactcatcactgtaaattcactaagctgaacccttcgtctctgcatcttgcggaaaagctccaatgcctccataagccgtttattccttacatatccactaatcata

SEQ ID NO: 15984 - DNA, 403 bp, Glycine max
tatagaatatataataaaagaacaatgacaattgtttagtctattcatgtttcctttgatgagtctaatgccattcttccaaggaaggattttttagatgatatttcagattccttagaagatacacatattcatggaaatgactctaaagaaaaagatgaaggaagcaatgaagattctcaagataatggagttagaacaaataatgaacttccaagagaatggaaagcctcaagagatcatcccctcgacaacattattgctgatatatcaaaaggggtaacaactagacattctcttaaagatttatgcaataatatggcttttgtatctatgattgaacctaaaaatataaaagatgccataatagatgataactggatcattgccatgcaagaagaac

SEQ ID NO: 15985 - DNA, 317 bp, Glycine max
agcttatgtctggtcaaatacagatttgagcatacataatactcccaacaactgatgcatacgaaattacttccatttgtttccgttccagatcatttctaggacattgagcgagactaaatttttctcctttctgaattggaatgggaaatgatgagcacttttccatcctatataactctagtactttattgaaatatgcttcttgagacaagcctaacaatccttgtgatctattttggaatattctatttgtatcacatacgttgcctcacccatttccttcattcaaagttactaaaaagaaccttttagtc

SEQ ID NO: 15986 - DNA, 363 bp, Glycine max
agcttatgctgcaaacatttataatagacctcctcagcagcaaaaccaacaatagcagaagaattatgacctttcaagcaatagatacaatccaggttggaggaatcatccaaatctaagatggacaagtcctccacaacaacaacagcctgtccctccttttcagaatgctactggtccaagcaagccatatgttcctcctccaatacagcaacattcacaacaaaaataaataaccccccctaattcgttactattttattactatctgttatgaacgtttggttgaccattgctcgttaggagatgacctatgatcacttcctagatactgcatttttaatgtttatttgatttgggtgc

SEQ ID NO: 15987 - DNA, 385 bp, Glycine max
tgaggtatttgtgccatagtaggccagatatttcttatggtgtgggcttgataagcagatatatgaatgattcgaggacttctcatatggctacaacaaagagaattttgagatatgtgaagggcacacttgactatggattgctattctccaaatcatatcataatcaaagaataaggttaattgttttttctgatgcaggagtggtgatgtagaggacaacaaaagcaccactggatatgtcttcaaattacttggatcaacaatctgctggagttctaagaaacaagaagatgttggacattcaacttgtaagtcagagtacatggttgctgtcttatcagcttgacaattagcctggttggagtcactctttgcagaattg

SEQ ID NO: 15988 - DNA, 396 bp, Glycine max
tctggtgggacatcttgacttgctttccaatctgacattcacttctagattctgccttcttctattttcagattgggaatgcctctcacagcacctttgtcaatgattttcttcatgcctcttaagtgcagatgtccaaatctttgatgccatattttgacttcatcttctttggaggatagacatgtggaggagtaactggtttcttgaggtgtccataggtaacaattgtcctttgatctgctgcccttcattagaacttcactcttctcatttgtcaccaagcattctgactttgtgaagtttacattgaatccttcatcacacaactgactgatgctgatcaagtttgcagtcagtcccttcaccagcagtactttgtccagactaggaagt

SEQ ID NO: 15989 - DNA, 398 bp, Glycine max
tctcaacgccctaaaccccagaaaccccaactaataaaattattccaaaaaaaattaaaaaaaaataaacgcataaaaaccctaatgcaccagaaaatttcaggaaaaaaaaaaacctaccaacacaaccccatctttgcacttgatcccaataacagtcctgcaacaaagtttcaaatctaagatcactaccaatacaaaaattacaaaatcatttaaaaaaaaaaaacatactcataattattaaataaactctttttttcaattttaaaaccacgaatttaaaagtataataataataataataataataataataatgataagtaccaacccgctgttgtcgacggctttagcggcatactcgatctggaaaacgcggccatcaggggagaaag

SEQ ID NO: 15990 - DNA, 348 bp, Glycine max
agcttcttattcaaggcaattcttggtggtgaagctccttcttccttggcttattccctagtggatggtgcctcccctatcctcttctcctttgccttccgctgcatctccatgatgaaaaatcaccattgaaggacctcattgaagatcaaagatccagcctccatagaagctccacaagcaagcttccatcaagttatgaccatttgaatgtctcgagatcttccgtggttcaatttcaggcgtctccatatgtcatgtgcctgaatcggacctccgtaagaaaatttatgaccatttgaacttctctagagcttccgtagttaatttcgagcttctcgatatctg

SEQ ID NO: 15991 - DNA, 382 bp, Glycine max
tgtgcattcaatatcctgatgagggtgttccatatgttctcaagactggactaatacatttgctgcccaagtatcatggtcttgcaggtgaagatcctcataagcatcttaaggagttcgatattgtctgttccaccatgaagccccctgatgtccaagaagatcatatctttctaaaggcttttcctcattctctagagggactggcaaaatattggttgtactaccttgctcccaggtctattttcagttgggatgaccttaagagggtgttcttggagaaattcttccctgcatctaggaccactaccatcagataagacatttcaagcatcacgtaacttagtggagaaaacttgtatgagtactgggaaagattcaa

SEQ ID NO: 15992 - DNA, 363 bp, Glycine max
atcttcataaggccttgtatggtttgaaataggctcccagagcctggaacaagagaacagatacttttctcttacaagttggattcatgagatgcactactgaatatggtgtgtatgttaaaagagaaagtctttcagacatcctcatagtgtgtttatatgtggacgacttgttgataacaggaaaagatttcaatgctatctcgacatttaagcaagagatgaaatctgaatttgaaatgtcagatcttagagaattatcatattttctgggcatagagttcaagaggacaaaggctgggatttttatgcaccaaagcaaatacacaactgatgttctaaagaggtttcaaatgtttgact

SEQ ID NO: 15993 - DNA, 401 bp, Glycine max
tgccagcagcaacagatttcttgagatgaacgaggacaagcttcttgtaggttgcaggcaactccttgtgcttcccttcgatgtatttggttatcgcgtattggctcgaaccggttctctctttcagactcgcaatcgcctctgctatcatctacagaataatcaaattaaatacaattggaaaagaaataaactaagagaattgattttgaaggagagtattttgggaaagtaccacggcgaagggagggtgggagaggggcttcttggacgacgccgttttcttggccttgggttgcgatgcggtagacatgatgatggcttgattgaaactcaaaacgaaaaaggagtaaccgttgttgaaattgaaacaagagatagatagaaattctgagagagag

SEQ ID NO: 15994 - DNA, 345 bp, Glycine max
  unsure at all n locations
agcttcaacatcagaccacttccagggtgctggaactacttcacatggacttgatggggcctatgcaagttgaaagccttggaggaaagaggtatgcctatgttgttgtggatgatttctccagatttacctgngtcaactttatcagagagaaatcagacacctttgaagtattcaaagagttgagtctaagacttcaaagagaaaaaaactgtgtcatcaagagaattaggagtgaccatggcagagagtttgaaaacggcaagtttactgaattctgcacatctgaaggcatcactcatgagttctctgcagccatcacaccacaacanaatggcatagttg

SEQ ID NO: 15995 - DNA, 393 bp, Glycine max
tggttacctccttcttcaatacatcaagaatcatcgggttgagtcttctttgtggctgtcttactggtttagccccatcctctaaatttatctgatgcatacatgtggatgggctaataccaggaatgtccgccagggtccagcctatagccttcttatgcttcttgagaacagataacaacttctcctcttgctcatcagcaagggaggcatatataattactggaaaacttttgcttttatccaagtaagcatattttaaatttgatggcagaggcttcaattctggtgtgggcggctggataatggtagaaagagatggtttctcagcctgtacctcataaagaaagtcagaggtatgtgtacttcctgaaacatggttaattctatctg

SEQ ID NO: 15996 - DNA, 347 bp, Glycine max
atctttttgaacgtcatgggaagatcacaaaggtggttcttccaccaccaaagtctggacaggaaaagaacagaattggctttgtacattttgcagacaggtcaaatgctatgaaagcactgaaaaacactgaaagatatgaattacaacgtaacatattgtccagccttttgtggttattttatgtgaatgttggtcaataatatttaaggtttgttctacgtttcaggtcaacttttacaatgctctctggcaaagccacaggctgatcaatagtctggaggatcaaacacacagaagccaggaccaggattgcttccaagctatccaccccatgttggttatgg

SEQ ID NO: 15997 - DNA, 324 bp, Glycine max
agcttctgtcctttgctaactattggactgaatctcggtccgggcaattaaaaagatgggactgtacctgccgaggaagagggcttcttcgagggcgcagcggaggctggattcctggtggcccaagccctcgcaagatccacagtgttttccggggcagtcgatgcgggtgccccaatagaggtacttttcgaagggctgttgttgtcgtcgctgtaagaggttggctttcgagacggtggtggaaagaagagaggagaacaggaagagaagcgcaatcgctgtcactgctgccgcgaggagcagaattcgggatctcgcgga

SEQ ID NO: 15998 - DNA, 439 bp, Glycine max
tcaagaataatggcctcagcatggtggctggaaatactacaatagagaaacctagagaagagtggtctgaagatgaaagaagattagtgcagtacaatttaaaggcaaaaaatattattacttttgccctaggaatagatgaatattttagggtttcaaattgtaagagtgtcaaggatatgtgggacactttacaagttacacatgagggaacaactaatgtcaaaagatctaggataaatacttcaactcatgagtatgaattatttaggatgaagacaaatgaaagtatacaagatatgcagaaaagattcacacatatagtttatcatcttgcatcattaggaagaacttttcaaaacgaggatctcataaataaagtgttaagatgcttaagtagagaatggcaaccaaaggtaacaaccataacagaatctag

SEQ ID NO: 15999 - DNA, 442 bp, Glycine max
agcttgtatgagtactggaaaagattcaagaaattgtgtgcaagctgtcctcaccaccagatttctgagcaactccttcttcaatatttctatgagggacttagcaacatggagaggagtatgattgatgctgccagtggtggagctcttggtgatatgacccctgttgaggctaggaatttgattgagaagatggcttctaactcctaacaatttagtacaagaaatgatgctattgttcttagaggagtccatgaggtggccacgaattcatcttcatctactggaaataaaaagcttgatgccttggtcaacctagtaactcagcttgccatgaataaaaaatctacaccttttgcaagagtctgtggtctatgttcttctgcagatcaccatacagatctctgtccttctttatagcaatctagagtcaatgagcaac

SEQ ID NO: 16000 - DNA, 447 bp, Glycine max
accttaaaactcagcttcacaagcagcttccatcacttgataggttagatccttttatcttcttcgaagggacataagtatatcttggttgctgctgagtatttcaccaattgggtggaagaaattcctttgaatgttgatcaaggggatataataaacttcatagaacaaaatattatttttcgatttagtatcccataaacacttataacaggtcaaggcaccatttttattgatcgaaaagtggttcaatatgtcaattctcaaaatattaagttagtaacttataccccttattatgctcaagcaaatggtcaaggtgaagccatacacaagaatttggtaaggttaattaagaaacatggccaaaaacctagaagttagcatgaaagtttagaccaaattctctatgcttatcaaaattcaccaaaagggggccactattgt

SEQ ID NO: 16001 - DNA, 433 bp, Glycine max
tatcaaacattagtcataaagtgataaggaggtgatttcttcaaatagatcattagcagaaaagaataataattgttcacacttcacaggaaacaaaagctatgaaaaggactgaaaatttaaacagcagaatgagtttgtacctgtacaaacttggcaaagccagacccaagaggggatccaatgtacagagccattgaagctccatttagcaaggatgcgtatactagccatggccccatcatccgtccaagattagtgggccagcacactacatcacctttacgaacgtccatgtggcaccatgcatctgcagcagcttttagagagtaatattggtccatggaattgcctttggatcacctataccaccaaatgaggtacattatattagcttttggctagcttcatatggtgagtgaagtcttggtat

SEQ ID NO: 16002 - DNA, 431 bp, Glycine max
  unsure at all n locations
tgcttgtaatcgattacacacatactgtaatcgattaccagaggagattttcagaanatattcttaacagtcacatcttttcatttggttcttaaatggctatcaaaggcctatatatatgtgacttgagacatgaatttgctaagagttttcagaacaaaaagatcttatcttcttaaaaagaaaaatcgttttatcctcttacaaattccttggccaaaacacttgtgattcaataagaaattatttgagtgcttaaattgttcaatctatctctttcaagagagatttcttcttctcttcttctttattctgaaaaaggattaagagaccgagggtctcttgttgtaaagaaatctgaacacaaaggaagggttgtccttgtgtgtttcagatcttgtaataggaatttacaagatagtggaactctc

SEQ ID NO: 16003 - DNA, 436 bp, Glycine max
agctttaggctaatataaacgacaataactatctactcggatgtctgatcgagtcccgtaatatatcaagacgctcgacattgaatgttgaacctatgagcccattcacacgacattaactatttaatctgatgtgtgattgaatcccgttatatatcgagacgctcgaaattgaatgtggaagctttacgcaaattcaaactacaatgactttttactcagatgtttaatcgactccagtaatatatcgagacgctcgaaattgaatgttgaacctatgagccaattcatacgacaataactgtttactcggatgtctgattgagtcccataatatatcgagacgctcgatattgaatgttgaacctctgatccaattcatacgacaataactttctactcggatgtccgattcagtggtgtaatatatcgggac

SEQ ID NO: 16004 - DNA, 435 bp, Glycine max
  unsure at all n locations
agcttctgggaaaaatccacgagttntcagtatcaaaactcctagtgtttcattggaattaggagtaacctacagtaataacaaattatctcatgaatatatcattccaaggctcattatttctcacgaaacttattcaccattagaaacaaagaggatttacctttctccaactatgaccaagaaattcattcacagctatagcattctgtccatacatcagtggtgaggaccagtaaccccacacaaaccatttgtgcacattctctggctcanagaacagaattatcatgataaaggttcattacactaatcaactntgaagttacattaccattttcttacctcgcgaaatcacaaatcctcccanaaccagaactataagtaatgcanaacttccaacagtatntgcaactataacatcccttccgaatg

SEQ ID NO: 16005 - DNA, 400 bp, Glycine max
  unsure at all n locations
tgcttaacaaaaggcatgcaaagtgggtggaattcctagagcaattcccttatgttatcaaacataaaaagggaaaaggtaatattgtagtcaatgatctttctcggcgtcatgcattactttctatgcttgaaacaaaattgattggtcttgaatgtttgaaaagaatgtatgaaaatgatgaatcttttggagaaatttttaaaaattgtgaaaatttttcagaaaatggtttctttagacatgaaggctttcttttcaaagaaaacaaattgtgtgtgcctaaatgttctactagaaatttgcttgtntgtgaagcacatgaaggaggtttaatggggcattntggggtccaaaagactctagaaacattacaagaacattnntattggcctcatat

SEQ ID NO: 16006 - DNA, 431 bp, Glycine max
  unsure at all n locations
tgtgggattgtgtgatagtgattntgccggagatgtttatgatagaaaaagtactaccggatttgtattttttgtgggtgattgtgtttttacatggagttctaagaagaaaggcattgtgacactttctacttgtgaagccgagtatgtagctgcaacttcttgcacatgtcatgccatttggctaagaagattgttggaggaacttcagttgttgcaaaaggaaagcacaaagatctatgttgataatagatctgcacaagagcttgccaagaatccggtgttccatgaacgaagtaagcatatagatacaaggtatcatttcattagagagtgcattaccaagaaagaagtagaattgactcatgtgaaaactcaagatcaagttgcggatattttcaccaagcctctcaaatttgaagagtttcgaa

SEQ ID NO: 16007 - DNA, 432 bp, Glycine max
  unsure at all n locations
tgcttttatatttgagtacctgaaaaatgggagcctagaacagtggctgcatccaaggacattaactcctganaagccaggaacattgaaccttgaccaaagattaaatatcatgattgatgttgcttctgcaatacattatcttcatcatgaatgtaaggagtcgattattcattgtgatttaaagccgagtaatgtacttcttgatgatgatatgactgctcacgtgagtgattttggcttaacaagacttctttcaactattaatggtgccacttctaagcaaacaagtacaattggaataaaggggactgttggctacattcctccaggtatgttctaaactcccaaaaaattgtttctttgatttcttcccttttgatgaaaaactgatatnntactaactacaagtatggggcaatnnttctatat

SEQ ID NO: 16008 - DNA, 434 bp, Glycine max
tcacacaatttatttttttttatcaaacttgagttttggaaaaccaattactaagactttcctaactagatgatttaaatgatgcatgttaatatgtgcagccctatgatgccacaatcatgaatcatctatcttactcaccaagcaacttagctcatgaaaagatacatgttcaacattcaacatatagatattacctattctcttactgatctggacaactttaccggatatggcttcacttataagacatcaatttctattgaactctattttgaaccctttatcacaaagttgactaatgcttagaaggttatgctttagtccatccacatataacacattcttaatctgagttttatgttgattccctatatcatgagaatcattatttttcctttgttgttgtctccaaacatgaccatagtttggac

SEQ ID NO: 16009 - DNA, 431 bp, Glycine max
  unsure at all n locations
tgagctccttcaactgctcaaagctcttaatattttattagtatccttgnggaaccttcacccgacgaatagactgacaaaagcttattttctcctttttggacaaagtatggcacgctgggggcaaataaattctcttcccatcagaccttggatgcaactgtgatcgtatgcccatataagctagatgttgacgggtattcaagccatccttcatcttgccttgaatgttaaggagcgtaccaatcacactgtctcaaacatttttctccacatgcataacatcaatacaatgtctaacgtcacgatcagaccagcacggaagatcaaagaaaatagacctcttcttccatatgcaactcttacttttatccttcttttgggacttcccagatataggatgtaagtgtggaacccgctcatatacctgc

SEQ ID NO: 16010 - DNA, 415 bp, Glycine max
  unsure at all n locations
tatttgcattntaagacaaatcccccccaccccgaaggctgattctcaatccagcagtcccttaccaccttgtggtaatgcttgttattaagccatccatcanagaccttataaggcttaggaccccaatcaatgctcttagatttcatgaggatagggcagtgatcagagtagttcctttcaaggttgtgctgcgaactgtctggccacttagaaagccaaccatcagagacaacagctctatccaatttgcttttacaggaaccattangcctaacccatgtgaactgcttacccacactangaatatcttccacctccatgatagcaagccaatcattgaaatctgacatgatgctggactctgaattccatgatngcttccatctctctgaaggtgcctaatacataaaat

SEQ ID NO: 16011 - DNA, 425 bp, Glycine max
  unsure at all n locations
agcttgtagatccccttgcaggactttntcttgttccatattgaccaaaacaatacattntgaanaatattaaacaaacctgtgctacacatagatgacatgtgttggatacctacaaattatattatgtattgaaacaaaggtcatttttatactctgaatccttaatataacctcttatacccttttctttaaaatttacttagcgagtattttttttccagtgatcaagatgattatgaggttgtacaaaaagtgggcagggggaaatatagtgaagtttttgaaagcataaatatcaatagaaatgagcgctgtataatcaagattctgaaacctgtcaagaaaaaaaaggtactcctttctttgcttgtnttatcctagtttactcntacctgcgactgtgaataagccagcaatgatgc

SEQ ID NO: 16012 - DNA, 409 bp, Glycine max
  unsure at all n locations
agtctgtatgaactcttagcttatcggcctacttatatgcaacccatttgagaatagcttgcatgtttgtgaaaatcttaccacaactatgctcctccagaaagattataatttgacatattttatgtcactgtggttcatgcacaataactaactctcctataggtgttcatagcgcttattatttttaatatattatcataatgtaaaatctattgactaaacttatataattattatgctatattatgtatcattaaaatntgtgtaacatatttatgttgaaaattattaattatgtacttttattaggaatgattaaggaagataatataatcaaccttttttgtaacataatagtgcatagtgcctcacttgatatataacattatttttaagaatattgcta

SEQ ID NO: 16013 - DNA, 427 bp, Glycine max
  unsure at all n locations
ttgcttcattggagcttgtaggcctaggatcttcttcatcaatggattcctatgcttcttgaaagatgaatggcagtggaatggagaaggaagagagaggagatgccacttcaacgagaagatgagtttagaagaagctcaccaccataggaggccatggataatagcttggaggaagaaggagatgaatgaagggagaggaagagaagagcacaaatttttgtgctctaaaagagctctgaaatctaaagtttaattttcaaatgatcaaagttggaaaaatgcacacacataacccctatttatagcctaagtgtcacacaaaattggagggaaatctaaatttctattcaaatttcacttgaatttgaaattgaatntgtggagccaaattttggagccaaaatttcactaattattgatagtg

SEQ ID NO: 16014 - DNA, 430 bp, Glycine max
tgaaggtaaactagatgccttggttaacctggttacccaattggccatgaataaaaaatctgcacctatcgccagactttgtggtttatgctcctctgccgaccaccacacagacctttgcccttatgttcagcaatctgaagcaattgaatagcctgaagcttatgctgcaaacatctacaatagacctcctcaacctcagcagcaaaatcagccacaacaaaacaattatgacctctccagcaacaggtacaatcccgggtggaggaatcatctcaaccttagatggtcgagtccttcacaacaacagcaacaataacaacaacaacaacaacaacagcaacaacaaccccagaaacagcaaccaattgagactcctccgcaaccttcccttgaagaacttgtgaggcaaatgactatgcaaaacatg

SEQ ID NO: 16015 - DNA, 423 bp, Glycine max
  unsure at all n locations
agctttgagcagattcaaacgacaataactttttactcggatgtctgattgagtcccagaatatatcgacacgctctacattgaatgcttatgctctgagcaaattcacacgacaataactntttactcggatgtctgattgagtcccgtaatatatcgagaccctcgaaattgaatgttgatgctctgagcaaattcaaacgacaataactttttacacggatgtgtgattgagtcatgtaatatctcgagacgctggagattgaattctgaagctctgagcagattcgaacgacaataactatgtactcggatgtctgattgaatccaatgatatatcgacacgctcgaaatagatcatgatgctctgagcatattcaacgacataacttgtactgggatgttgaagagtctgaatatatc

SEQ ID NO: 16016 - DNA, 438 bp, Glycine max
taacaaaaggcatgcgaagtgggtggaattcctagagcaattcccttatgttatcaaacataaaaagggaaaaggtaatattgtagccgatgctctttctcggcgtcatgcattactttctatgcttgaaacaaaattgattggtcttgaatgtttgaaaagcatgtatgaaaatgatgaaacttttggagaaatttttaaaaattgtgaaaaattttcagaaaatggtttctttagacatgaaggctttcttttcaaagaaaacaaattgtgtgtgcctaaatgttctactagaaattctcttgtttgtgaagcacatgaaggaggtttaatggggcattttggggtccaaaagactctacaaacattacaagaaacattttattggcctcatatgacaaaggatgtgcagaaattttgtgaacattgcattgtatg

SEQ ID NO: 16017 - DNA, 449 bp, Glycine max
  unsure at all n locations
gaccttaaatctccgcttgcggtactttaactttctcaatgtacaaacattttttcacattgaatttattatacatagtatatatttccattcagccttttatataataaagttggcaattgacatatatatttcactttttttatgatatggagagtcatgagatgttttgattattgattttattctgggtacttttggtatcattccttaagactattgaagtgtggaaagagctgcatactaatgtggattaactatctaaggcctgatatcaagagaggctatttctcaagtgaataagaggaaattatcattaagatgcatgagttgctggggaacaggtatatattcgtcgattcattcttcagattaatggcattaatgatttgtcttaattaataatagaaagttcgaacagaatattagtactangttattaccatgaa

SEQ ID NO: 16018 - DNA, 387 bp, Glycine max
tatcttatcacatatggagacgcctgaaattgaaccagagaagatctcgagaaattcagatggtcataacttttcactcagatgtccgatgctggcgcatagtatattgagacgctcgaaattgaacaacggaagctctcaagaaatgtaaatgatcataaatattcactcggatgtccgattcaggcgcatcatatatcgagacgctcgaaattgaacaatggaatctctcgagaaattaaaattgtcataacttttcactcgcatgtacgattcaggcacatcagatatcgagacgctcgaaataaacaacggaacctctcgagaaattcaaatggtcataacatttcacactgaggtccgattgatgcacatcacatatggaga

SEQ ID NO: 16019 - DNA, 414 bp, Glycine max
  unsure at all n locations
agcttgcttttcctttgtcttttggatcttcaatacctttttcacaatcttttgctcttcaaccaagaaagctcgaatgattctacagaaccagagacaaaagtaagcaaggtactccatcaatttgcacaaagaaaattaaacatactgtagattaagaagattgagaaaaacaaacctctctctaacagcactgccagacaacacaccaccatatgcacggttcacagtccttcggttnttgggtaaccttgatctcttatattctgttggccttaaatgtggaatctgcaattgccaagcattaataaccattatgttataccgtgtatcattcatacataatcctntaccaatcatagaaagaaaaatctagttgtaggaaccttgaacatcataatcttaactnttaag

SEQ ID NO: 16020 - DNA, 431 bp, Glycine max
  unsure at all n locations
tacacattcgtggagaanaacagattcaagtttttctgtattggataagtcagggatctcaataaggtttcgacaaccacaaaggctaattatctttaaattagcaagattctgtgacaagaaagatgcatcacattgttcagaaattgttaaaatcataaccatgagccttaactgaaagagaaacctaagcatgactcttgcgaatgagcttcacttgaggcagcacaaaaccagttaccattgacaactctctcatgtacctttacaaattgaaagaaaaattagcatgtatgcaacattcatacctgaaccccgtcccaaggctttttaagcttgctatcaggcatgtggagctctacaatntgttcagcacanaagttagacggcaaagacttgagatagaatctatcccattcaaggtacatcaa

SEQ ID NO: 16021 - DNA, 431 bp, Glycine max
tatagaatactgccgctatattgatgcgccgtgaatggacatacgagtgaaaagtttttaccatgtgaatttctcgagagcttcctatgtttaattttgagcgtgtcgatatattatacgcctgaatcgaaccttagtgtagaaagttatgaccatttgaatgtctttagagcatccgttgttcatttttgagcgtctctatatgtgatgaggctgaatcggacctccgtgtgaaaagttatgaccttttgaatttctcgagagcttccgttgttcaattatgagcgtctcgatatattatgcgctcgaatcggacatgcatgggaaacgctaggactattcgaatctctcgagagcttccggtgtgcaattgcgagcgtctgcatatattatgcgcgggaatcgcacatacaggggaaacgttatgacca

SEQ ID NO: 16022 - DNA, 417 bp, Glycine max
tgtcgaaatgactaaaacgcattcttgcattgattgttctaagtcttggaacccttgtgacacttgtcattttgctaaacaaaagaggatgcctttccctgacaacattattgtttcctcccaatattttgatttgttgcacatggatatatggggctcttatgctcatccttcattacttggtcataaatattctcttaccatcgttgatgacaaaaacatatatacatggattattttcctataattaaaaccagaagtgtcaaatcatattaaacactttatatctatggttgacactcaattctctgtcgcagttaatagcattagatcacacaatggccctgaattttccctgaaaaatttctatgattcccaaggtatttttcatctaacttcttgtgtggagacacccca

SEQ ID NO: 16023 - DNA, 408 bp, Glycine max
  unsure at all n locations
tctaaaagatttgtgcacccacaaaaggaagctatttgcaatgaaaggattagcatgggcagaaatatgtcagcatttataggtaaatttgttcctcacattcctgagaaatgtaaggacccaggtactttctgtataccttgcattattgggaacagtaaatttgagaatgccatgctagatctatgagcatcagttagtgtcatgcctctgtccattttcaattctttatctcttggacctttacaatctacagatgtggtgattcatttggcaaatagaagtgttgcttaccccacaggtttcatagaggatgtgttggttcaggttggtgaacttatttttcctgttgattnttatgttcttaatacggaagaaggattttcccatggtttagttccaattatt

SEQ ID NO: 16024 - DNA, 396 bp, Glycine max
  unsure at all n locations
agcttagccctagaggggatggaccttttcaggttttggagaggatcaataacaatgcctataggttggacctcccagaagagtatggagttagcaccacttttaacatttctgatttaattccttttgtaggtggagctgatgttgaggaggaggaactaacatatttgaggtcaaatcctcttcaagggggaggggatgatgcaatcctccctaggaagggaccagtcacaagagccatgagcaagaggctccaagaggattgggctagagctgcttaagaaggccctacggttctcatgaacctcaaggtagatttttgagcccattggacaaggttgggtccaattatctntgtacatatttgattangatgtcattatatttggtccttgt

SEQ ID NO: 16025 - DNA, 418 bp, Glycine max
  unsure at all n locations
agcttgataatggaggatttccttgagggtcctctcttatgcaatcatggaacacaactccaaactcaaaaatggaggacacatgaatgacaacgccattcattcatggngctccgataaagggtaagaatggaggatttgcttgagggtcctctcttaggcaatcatggaacacaactccatactcgaaagtggaggacccacgaacaggcctaagcaatagcattcatgtggctccgaaaaaggatgagaatggaggattgccttgagggtcctctcttangcaatcatggaacacagctccaaactcgaaaatggaggacacatgaatgacaacgcaattcattcatggtgctccgaaaaagggtgagaatggaggatngccttgagggtcctctcttatgcaatcatgatacac

SEQ ID NO: 16026 - DNA, 445 bp, Glycine max
  unsure at all n locations
agcttttatataaacatggcctcagcaaactccttatttccagaagggaattctatcaatagacctccaatctttaatggagagggttaccattactgganaacccgaatgcaaatntttattgaggcaatagatctaaatatttgggaagccatagaaatagggccttatatacccaccacagtggaaagagtttcaatagatggtagttcatcaagtgaaagcataactatagaaaaacctagagatagatggtctgaagaggatagaaaacgagtacaatacaacttanaagccaaaaatataataacatctgccctgtgaatggatgaatatttcanggtttcaaattgtaagagtgctaaggaaatgtgggacactcttcgataacacatgaaggaactacagatgttaaaagatctangatatatgcactaactcatga

SEQ ID NO: 16027 - DNA, 433 bp, Glycine max
taccaccataggaggccatggataagagcttggaggtttaatgagatgaatgaagggagaggaagagaagagcacgaaattttatgctccaaatgagctttgaaatctgaagtttaatattcaaatgatcaaagttccaaaaaaatgcacacacaaggcctctatttatagcctaagtgtcacacaaaattggaaggaaatttgaatttctattcaaatttcacttgaatttgaaattgaatttgtggagccaaactttggagccaaaatttcactaattatgattagtgaatttaagctatggttcataccactaattaaagatcaagtccaagattctccactaagtatgcttaggtggcatgaggcatgtaaagcatgaagcacatgcacaaagtgtgactatatgatgtggcaatggggtgtagcaagc

SEQ ID NO: 16028 - DNA, 417 bp, Glycine max
  unsure at all n locations
ttttgcttttattttagtagatgaagatgaatctgtggccacctcatggactcctctaaggataatagcatcatttcttgcactgaattgttgggagttggaagccatcttctcaatcaaattcctagcttcagcaggggtcatatcaccaagagctccaccattggcagcatcaatcatattcctatccatgttgttaagtccctcatagaaatattgaagaaggagttgctcagaaatctggtggttaggatagctngcacacaatttcttgaatctttcctagtactcatacaagctntctccactaagttgcctgatgccttgaaatgtctttctgatggcagtggtcctagatgcanggaagattttctccaagaacactctcttaggtcatcccagctgaaacggacctgg

SEQ ID NO: 16029 - DNA, 439 bp, Glycine max
  unsure at all n locations
tagcttcccgccaatggtatttaaaatttcatgaggtcatttcttcatttagctntgaagagaatgtcatggatcactgtatataccagaaggtcagtgggagtaagatttgtttccttgtattatacgtagatgacattctgcttgcgactaatgataagggtatgctatatgaggtgaaacaatttctctcaaagaactttgatataaaggatatgggagaggcatcttatgtcataggcataaagatccatagagaaagatctcgaggcattntaggcttgtctcaagaaacctatatcaacaaagttttagagagatttaatatgaaagattgttcaccaagtgtagctcccattgtgaagggtgacaaacttgctntgagtcaatgccccaaaaatgattntgagcgggaacacatganaaatattccatatgc

SEQ ID NO: 16030 - DNA, 433 bp, Glycine max
tgaatagcagatccagtgcactcagcataatcatgttttatcactatgttccctaaaaattctgtgggattgagtatctaaaaagtaatgacaaaattgattagtttattaattaatggatgacttttttttatcggttaatgaatatgtacttgttgcatgcattattaacttatataatacttacttccaaccattcttgagttcctgatggttcccatgctgctaaaccaccttttctactctgcaataattaagagaaaaaagaaccacagttgcatcaaaagtaaatattctagtagtaaaagtaaatcaaacatcaattattaatgtcgtctgcgctaaccccaacttcccaatgataaaagattaaacaaagagaaggaccatcaattgattgatctattaattaattaaaagcatatgaccatga

SEQ ID NO: 16031 - DNA, 433 bp, Glycine max
  unsure at all n locations
tccaagaatcaagatcaagattcaagactcaagtattatgaatcaagagaagacttaatcaagataagtatgaaaaggttttttcaaaaactgagtagcacatggatttttctcaaaacatgtttaccaaagagtttttactctctggtaatcgattaccagatttttgtaatcgattaccagtagcaaaaatgtttttcaaaaaactttcaactaaatttacaacgttccaattgatttcaaaaagctgtaatcgattacaatgatttggtaatcgattaccagtgtgtttgaacgttgaaattcaaattcaaatgtgaagagtcacatcctttcacataaaagctgtgtaatcgattacactaatttggtaatcgattaccagtgattgtttctgaataaatcaaaagatgtaactcttcnaaatggtttt

SEQ ID NO: 16032 - DNA, 435 bp, Glycine max
  unsure at all n locations
tagcttcaacattcaattntgagcgttntgatatattacgatactcaatcggacatctgagtaaaaagttattgtcgtttgaatttgctcagagattcggtattccatttcgagcatcccgatatattacgggactcaatcagacatccaagtaaaacgttattgtcgtttgaatttgctaagagcttcgataatcaatttcgagcgtctcggtatattacgggactcaatcagacaaccgattgaaaagttattgtcgtttgaatttgctaagagcttcgataatcaatttcgagcgtctcggtatattacgtgactcagtcagacaaccgagtgaaaagttattgtcgtttgaatntgctcacagcttcaacattcaatttctagcatctcgatatattccatgactcaatcatacatccgagtaaatagttg

SEQ ID NO: 16033 - DNA, 425 bp, Glycine max
  unsure at all n locations
ttgagcaaattcaaacgacaataagtttttactcggatgtctgattgagtcccgaagtatatcgagacgctagaaattgaataccgaagctctgagaaaattcaaacgataataactttttactcagctgtctgattgagtcccgtaatatgtcgagacgcttgaaattgaataccgaaggtctcagcaaattcaaacgacaataactttttactcggttgtctaactgactcccgtgatatattgtgacgctcgaaattgattaccgaagctctgagcaaattcaaacgacaataacgttttactcggatgtctgattgagtccagaaatatgttgagatgcttgaaattgaagactgaagctctgagcgaattcaaacgacaataactttntactcggatgtgtgactgagtcccgtaatata

SEQ ID NO: 16034 - DNA, 390 bp, Glycine max
  unsure at all n locations
agcttattatatattgatacgctcgaaattaaacgtcggaaactctcgggaaattcaaatagccataaatnttcacacggatgtccgattcgggcgtataatatgtcgagaggctcgaaattgaacaatggaagctcttgagaaatttaaatgggcataacttttcacacggatgtccgattcaggcttataatatatcgatacgctcgaaattaaacatcggaaactctcaagaaattcaaatggtcataacttttcacacggatgtccgattcgatcgcataatatgtcgagaggctcgaaattgaacaatggaaactcttgagaaattcaaatggtcataacttttcacacagatgtccaattcaggcttataatatattgatacgc

SEQ ID NO: 16035 - DNA, 427 bp, Glycine max
tgaatcggacatccgtgtgaaaagttatgaccatttgtttttcacgagagcttccgttgttcaatttcgaatgtcactatatgtgatgcgccaaaattggacattcgagttaaatgttatgaccatttgaatttctcaagagcttccgttgttcaattctgagcgtctcgttatgtgatttgtctgaatcggacatccatgtgaaaagttatgaccatttgtatttctcaagagcttccgatgttcaatttcaagcctctcgacatattatgcgcccgaatcggacatccgtgtgaaaagttatgaccatttgtatttctcaagagcttccgatgttcaatttcaagcgtctcgacatattatgcgcccgaatcggacatccgtgtgaaaagttatgaccatttgaatatctcgacagcttccgatg

SEQ ID NO: 16036 - DNA, 437 bp, Glycine max
  unsure at all n locations
tgtccaatgaggtgacaatgaanatacctagtgttactatctgatatacagtttttgctgctcgttttattgtcaattccaactgcatcaatgcatctttaacaagcataccacgaaccagagcagcaaccaagttgaccttctttggactctaaaataccatagaaaacaaggtatgtaaaatgtgcaactagtcagatattaatcagatccttcttaaaccataaattaaggcattttccacagcaaaccagggaaggcatttcaatggctaaaaaattagatgccaacttttctgcaaaataacatgttggttaaaacacagaagtttcttagcaagtagctaggcagtggcaccacataaatgtaacaaaacattgtaattcttcaatatttatgttatggctaagctgaacatacttgtgataatacttatg

SEQ ID NO: 16037 - DNA, 438 bp, Glycine max
  unsure at all n locations
agcttatactaagttcagcctaccatcctcagtcagaggatataccgaagactgcttttangatccgttatggtcactatgagtatctagtcatgccccttggtatgactaatgctccaggtgtgtttatggactacatgaatagagtatttcacccttaccttgatagttntatggtagtattcatagatgatattttggtatactctaagactagagaggaacatgaagaacacttgaggattgtgttgcatacccttagggaccgacaactntatgctaagctgtccaagtgtgagttttggttagagaaagttagtttcctagggcatgtgatatctcaagggggtaaacctgtagatccctctaagatagaagtcgttcttgagtgggagagtcctaagctnttgtgtgggatacccaatgtaagcatagttt

SEQ ID NO: 16038 - DNA, 432 bp, Glycine max
  unsure at all n locations
agcttcttagtttcagatgatgcagctgagtttgtagctacctcatgcactcctctaatgattataacatcatttctggcgctaaactgctgggagttggaagccatcttctcaattaaatgtctagcttcaataggagtcatgtctccaagggctccaccactggcagcatctatcatacttctctccatattactgagtccttcataaaaatattggagaagaagctgctctgaaatctgatggtgagggcaactagcacatagttttttaaatctctcccagtattcatacaggctctctccactgagttttctaatacctaagttatccttcctgatggctgtggtcttggaagcanggaaaatgttttctaagaatactctcttaaggtcatcccagctcgtgatgaaccttggagcaaggtaatac

SEQ ID NO: 16039 - DNA, 429 bp, Glycine max
  unsure at all n locations
tatcttgtgaaatatggcataacaaatattgacgaatgtntgtttatgggtcagactattctagagcaattggaaggccttcctaggcataaagcanatgccagatatgtgaactatgttgcagaanaggacaaaaataatggtaatttatatgattcttcacttttagctaataataacatggagcttttctctgagcctgagcatgctaaggtgtttggtcatgttcgtaagctttcaaatgagagtgttgaaagcgatggaagctcaatacgaggtagtgacatgtctaattttgggattccaagttcatctggtgatggctctcatgaccttcctggatctgctttggtttcaagagagacagatattatgggccacacanagtcgaagtctactggtgaatactcaatagtccttccactagat

SEQ ID NO: 16040 - DNA, 426 bp, Glycine max
tagtgtagaactggccaccaaaataaccttttttaatttatgagttgatcaaaatgaaaccctcgtgcaacataaaaggcagaagcaaataataattatttacctcttttcttctctcagctcgctcatcacacttgaaactgaatccatattttgggagcgcccccaccctgcgaggtttggcatcttctgcagtaggacttacaactggattaaggataaaccataaatacactgtgccactctcagtaacaaactaacaacataaataatataaacaaatccacattagctccccattgcctctcaccaccataaacaatgctcaaccaggaaaaaaaaggatacgaagaagattctgcttctccttgaagattatcatggggatctttcttcgataattgtggtctagtcttctccctgtat

SEQ ID NO: 16041 - DNA, 408 bp, Glycine max
  unsure at all n locations
ngagtaaggcacccctttggtttgaagacgcgttcttgttgagaggcatccacataaagttctccacagaaaatgctttatcttgggaggtatacgaagattccatatagtggaccagcttccttgaactttgagagcttctttgttcaccatagtctccattaaaatatgataatctgatcaaaccgagtatgtccccatggtactaactttcaaaatcaaaatatcagaatcatgaagattgaagagtggcatcatctttatttcttgggaatcttctttattgaaaaattgatcagtaacctcaatgttccaactattgctttcaacatcaataagcgaatgtactgtcaaatgttcaagaccaaaaagaggtaaggacgaaacataatacttatctttattctg

SEQ ID NO: 16042 - DNA, 441 bp, Glycine max
  unsure at all n locations
ggaccttaaatctcagcttggccaggtattcatgtttatctagcctttgagtatgtccattttgatttatggggaccatctagaggaaaaactcatggtggaagctcatactttctcaccatcatagatgatttctccagaagagtatgattgtatgttttgaaaaataagtcagaatcttttcaaaaattcagagaatggcatactcttattggaaatcaacttggtacaaaattaaaagttttaaggactgacaatggcttggagtttgtttcagagcagttcaatgagttttgcaggaaaataggcatcaaaaggcacaaaacagtccctcacacaccacaacagaatggtttagcagaaaggatgaataagaccattttgganaaagtgaagtgcatgctactaagtgcaggactgccaaataccttttggggagaa

SEQ ID NO: 16043 - DNA, 423 bp, Glycine max
  unsure at all n locations
ttcaactttgagcctgagcaagttgaatcttattctgctcacaggctaatctgaagggtgttgtgttgaaggctangcatatagctgaagcagctttgtttcttgcttctgatgatgctgctgtttacatcagtggtcacaacttggtggtggatggtgggttctctgtggttaatagaagttattctttcacaccagcttaattacatgtagagccaaaaaaacatagttttgtggctggttggcattaatttccctagccttcatcaagttgagaacatgatgatgtcatgcagtgcgtcaaattaccttgttactgggacttttttttcatttgcactctactaataattctgcaatgtctcttctttgtttgcattttcaaagcatacattcatcaaccttgtctgcttgtgactcaaa

SEQ ID NO: 16044 - DNA, 401 bp, Glycine max
atgcagctgagttggtcgctacctcatgctcttctctaatgactatagcataattgctggcgctaaaccgctgagagtcggaagccatcttctcgatggaatatctggctccagcaggagtcatgtctacaaaggctacaccactggcatcatatatcatacttctgtccatattactgagtccttcataaaaatattatagaagaagctgctccgaaatctgatggtgaaggcaactggcacatagatgtttaaatctctctcactactcatacaggctctctccactgagttgtctaatacctgagatatccttcctgatggctagagtcctagaagcacggaaatatttttctaagaatactctcttaaagtcatcccagctcgtgatggaccatgga

SEQ ID NO: 16045 - DNA, 432 bp, Glycine max
  unsure at all n locations
cccatggaagctcctaatatctcccacactttatggggagggtcattcttggatggccttgattttcttagggtccacttggaccccatttctaccaactaaaaaccctaagaaaactatattatctacacaaaaggtacacttctctatatttgcatagagggtgtttttcctaaggactgaaagaacttgcctgagatgtcctaagtgatcatctaggatcctactatatactaaattatcatcaaaataaacaactacaaatctacctatgaaatcccttaagacatgatgcataagcctcataaaggtgcttggagcattagtgggcccaaaagcatcactagcccttcatacaaaccaaacttggtcttgaaagcggntntccactcatcaccctctttcattcctaattggtgataaccactttta

SEQ ID NO: 16046 - DNA, 391 bp, Glycine max
  unsure at all n locations
atcttggagcatgcttattacatggagtagatgcaaccaaaataaagcttcattcaaatttaaaattgtggaggtttgaccgagttatgttcaattntcctcatgtcagctttcatgggaaggaaaataacacattactaattaagtgagttttcttgtaagattcagttagaagactaattaatgtggcaccctctaccccgacatacatatagtgaaaggaaacatagaatagtgggagtaacttaaaaagatttacttcacaattcaatataaaacttctcaacggagtaaaggttcacattcacccattaaccaagttaaaacttatcggtaagaatataaaaacatgtttcggctccaaacaaagaccataccggtattataacta

SEQ ID NO: 16047 - DNA, 442 bp, Glycine max
tggacttcctgtgttttgggaacctctccttcctcaggtgtacccaaacccaatcacctggttcaagcatgactttctttctgcttttgttggcttgccttgcatagctcgcatttttcttttcaatttgagccttcacttgctcatgcaacttcttcacatactcagctttagcctgtgcatccttatgcttaaacatagcaatgttaggcataggcaacaaatcaagaggagtcaaaggattaaatccatacactatctcaaatggtgaacaattagttgtgctatggacagcccgattataagcaaactcaacatgaggcaaacaggcttcccaagatttaagatttttctttaaaacaatcctaagcagtgtgcctaaagtcctattgactacctcagtttgaccatcaatttgtgggtgacaagtagtagaaaacaa

SEQ ID NO: 16048 - DNA, 435 bp, Glycine max
  unsure at all n locations
cggtacctcggngaatcctctataagtcgactctgcattgcatgcaagtcttcataaactttatacaacgaatgacagctctgatatcactatgttacacacagtggcctcagatatcgataagaagggggggttgaattaagatatcaaagactttcctcaattaaatttttaattctcctttttaaaattttcaatgtacctttattatgaattactaaaaagacaattcaaaataaacttctttaatgcaaaagaaaaataacaataactaaaagaagtttaagggaaaagaaagtgcaaactcagtttatactggttcggccacactctgtgcctatgtccagcccccaagcaacccgcttgagatttccactatcttgtaaaattccttttacaatgtctgaaccaaggacaacccttcctttgtgttca

SEQ ID NO: 16049 - DNA, 383 bp, Glycine max
atcttatctttatctctaccaacaaaaaaaaaaaacccagagtaaatgggacaaaatctgattaatcagactttctaacattagatatcaatattaatattatatatagttaaataatacaaatataatgttaaattaacgtatattgtttaacatattttaaaataaacaaattcattctaaacataatacataattgcttaagagaatattaacgctaaatcatgttaggacaatccaaaccacaacgtgaacaatgttacaaaatgtatcatgttcatttctaatattcaaacctatgcaaattaactaagttggattgaatcaaggtgtgcttgaattattggtgggaaaatacaaaaacatatttgagaataaaatca

SEQ ID NO: 16050 - DNA, 391 bp, Glycine max
agcttctatatattgttcgttcctaatttctctacaattgcatcacctctcaatgagctggtgaagaagaatgtggcatttacctggggtgaaaaacaagagcaagcctttgctttgctcaaagaaaagcttactaaggcacctgttctagctcttcctgacttttctaaaacttttgagctagaatgtgatgcctctggagtgggagttggagctgtattgttacaaggtgggcaccctattgcttattttagtgaaaaactacatagtgccaccctcaactaccccacctatgataaagagctttatgccttaataagagccctccaaacttgggaacattaccttgtttccaaggaatttgtcattcatagtgatcatcaatcactta

SEQ ID NO: 16051 - DNA, 432 bp, Glycine max
  unsure at all n locations
ntgatttcctttgttccgganacctttcttttctcatgtgcacccaaacccaatctccgggttcgaagacaaccttctttctccctttgatggcttgtttagcatagcttttacttttcctctcaatttgatctttgactctataatgaagcttcttcacatagtccgcctttgcttgaccttctttatgcttaaaaacagaaacattaggcataggcaaaagatcaagaggagttagtggattaaaaccataaacaacttcaaggtttaagaaagaagaatcatcggatgacgccgatcgaacatttcctaatagacatcatccaaatattattcagggattgaatagaagatacaatagccgacatcggccgttgtaaatcagcgactgatatttttcagccgacgttgcgcaatttcttttacaaacgt

SEQ ID NO: 16052 - DNA, 424 bp, Glycine max
  unsure at all n locations
ttccagaggcaagctaatttgtacgccctcccgatggagcatttacattcattatcttctttgtggactttttctaagtgtggaattgaaatcctcaatcccttaccgattggcatcctccagctgaagtattaattgtggcaattgactaattcaacaaatgggttgaagccgagctggtagccaggatcaccattgaacaagtacataaatttttatggcaatcaataatgtgcctatttgggatgctaaaaaccttgatagtagacaatggcacacagttcaattgcaatagtgttaaagaatttgtgacagccacaatgtaaagttgatttttgcttcggtggaacaccctcaatcaaatggtaaggtagaggtggccattaaggtgatactaaagggttntaaatcaaactttcaacat

SEQ ID NO: 16053 - DNA, 359 bp, Glycine max
ttctttgagccaattcaaacgacaataactttttactcggatgtctgattgagtcccgtgatataacgagacgctcgaaattgaatgttgaagctctgagcgaattcaaacgacaataactttttactcggatgtctgattgaggcccgtaatatatcgagacgctcgaaattgaatgttgaagctctgagccaattcaaacgacaataactttttactcggatgtctgattgactctcgtcatatatcgagacgctcgaaattgaatgttgaagctctgagccaattcaaacgacaataactttttactcggatgtctgattgaggcccgtaatatatcgagacgctcgaaattgaat

SEQ ID NO: 16054 - DNA, 412 bp, Glycine max
taaacattcaacttcgagcgtctcgatatattactagtctcaatcaaacatccgagaaaaaagttattgtcgtttgaattggctcagagcttcaacattcaatttcgagcgtctcgatatatgacaggactcaatcagacatccgagtaaaaagttattgtcgtttgaattagctcagagcttcaacattcaatttcgagcgtctcgatatatcacgggactatatcaaacatccgagtaaaaagttattggcgtttgaattggctcagagcttaaacattcaatttcgagcgtctcgatatattacgagactcaatcacacatccgagaaaaaagttattgtcatttgtaattgctcagaggttcaacattcaatttcgagcgtctcgatatattacaggactcaatcaga

SEQ ID NO: 16055 - DNA, 426 bp, Glycine max
tatattataaaaataaattgttaacttataatgattattattatgatataacatgtacacatactattatgattaagtcggttaattaagttataatttgcactctgcctttatctcaaaggagtcaactcaaggtttctttattatccatttagaatgaaacacatataagttatactcgtgagcatgctaggtatccacttttaaatgaaaaaaaagtatagaggtagattatcaattactttttttaaattatattgaataacttaattattttttatagtataataacttaccataaacaaatattaaagaagtatccgtgtctattctatagtctcttcttagaaaaccataatggttggctctttattggaaataataagtcatgatagaaaatcacataaaagcccatttcctcttttc

SEQ ID NO: 16056 - DNA, 436 bp, Glycine max
  unsure at all n locations
tagaagatctatatatggactaaaacaagcatcctaccaatggtatatttagtttcatagtgtggtctccaaatatggattttgtggaaagtgttgtagaccaatgcatataccttaaagtcaataggagtaagttgattttcttagttctatatgaagatgacattttacttgctaggagtgacttaggtcttttgcatgacactaaatttttcctctcacaaaactttgatatgaaggatatgggtgaagcttcctatgtcattggcatagaaattcatagagatagatctctaataacattaggactatctcaaaaggcctacatagaaaagttttgaaaaaatttaatatgcaaaattgttcatcaattaccgcacctatagttaaagggaaaanttttagtatcaatcaatgtccccaaacaacattggaa

SEQ ID NO: 16057 - DNA, 357 bp, Glycine max
atattactagcaactctaagatgagcgaatagacatcttacatactaagaaggtaatgtataaatcaatcctcaccggaatgactgagtaaaaaccatttggtattggatctgaaagcattccaatctgccagagtgctagtgatgctgtcagagaagacagcacatcttcgacaacatgtcgaggagattacttattacttaaggtctcatcttgagaacccaaagaaacagatccaaatttttcaacaaaatctgaaggccaccacaacacattagatggcccttgctctgccggccctgcatcttctcgtgtctcctccatgttcttatatatttagaatgaaaaaccatttcg

SEQ ID NO: 16058 - DNA, 445 bp, Glycine max
tcaagcttctgacaaaatccatcaacacatgcggactccaatttgtggcttactattatgttcctcaattttgcatgatttgtcctcacttctctgccaacttcattctcatcatccatcacaattttcacagctttgcttacactctccttcgtgaaccagccatcttcttcacccttctccacttcaaccccaatctttaagttttcacccatcatccttgcattaactatatgatcaccatctacctgtggcagtaacactatttggcacttattcactagtgcctcagttaatgaaccagcaccacaatgtgttatgaagcaacccactgaagggtgttccaaaatcagctgttgctgtatccatccaccgaggacaattactctctcttcaaccctttccttgaacccttctgggagagcagcttcaagtgtctcaaacc

SEQ ID NO: 16059 - DNA, 379 bp, Glycine max
ttcttgagaatggagaattgcactaagcaatcactacgcatagctccaaactcgaaggtggaggacacatgaacgaaaacacaattcatggggctccgaaaaaggggttgagaatggagaattacactaagcaatcactacgcatagctccaaactcgaaggtggaggacacatgaacgataacgcaattcatggggctccgaaaagattgagaatggagaattgcactacgcaatcactacgcatagctccaaacgcgaaggtggaggacacatgaatgaaaacgcaattcatggtgctccgaaaagaatgagaatggagaattgcactaagcaatcactacgcatagctccaaactcgaaggtggaggacacatgaa

SEQ ID NO: 16060 - DNA, 424 bp, Glycine max
  unsure at all n locations
ntaaaagattggctaagattttgttaaaacatattctcttagacaatgaaggaaagctggagttgctgcacatgatgtccaacgttatgtcaaagaataagatcgggctgcacaatgcacaaggcaagataaagtgtcaaatgaagaattgaagctgcaggattcacgatgtcggatataatgtccaggacatcctgcctgaaaatactggaattgctaaaagcattgaagctgcaggatccacgatgtcggatacaatgtccaggacatcctgcccgaaaatactggagttgctaaaagcattgaagttgcaggatccacgatgtcggatacgatgtccaggacatcttgcccganaatactggacatataaatctgttatatctttaacagattattgtgcagttagcaagagattagatga

SEQ ID NO: 16061 - DNA, 423 bp, Glycine max
  unsure at all n locations
ntccttcgagtccctgcatgtttagccctgatcttggtcataggattggacgaattgatctggtcccacctttaagtttagatggtcaattagggaaagcaattgcatcgcctccaatgtctcctcgaggacttagacagctctctttgcccgtcaaatcattgcatgagaaattgcagaattcaccgcaagtgggtgttatacatttggctcttcaaaataactcagatggcttaattgttaggtatctgctactatgctactatgtttcatgaactcctattcattgtcaatagttatttttgcccgtgtggatggaagcctgatgctattgtccttttatttagttggcacaatgatgtatttgttgtggctgaacctggagagctcgctgagaaatttctacaaaatgtntaaattcag

SEQ ID NO: 16062 - DNA, 377 bp, Glycine max
tttcttttttcaggttattgtgtaaaaatcagtttgtccaatgggatgatgattttcaagtggcatttgaaaagattaaatgatgtttgatgaatcctcctatgctcatgccattggtgcccggaagacctcttatcctatacatgacagtattagatgagtcaatggggtgtgtgctcggacaacacgatgaatctggaaaaagggaatgggccatctactacttgagcaagaagttcacggcatgtagatgaactaattgttcctagagaggacatgttgtgccttggcgtgggcagctcaccgtttgaggtagtatatgctgagttacactacttggttggtgtccataatgtatcccgtcgagtacatcttcg

SEQ ID NO: 16063 - DNA, 419 bp, Glycine max
  unsure at all n locations
tgctgcaacagcatgtaactctttntaaaataatttctccaagaacagtggaaatagtaaaccaagtgaaaatgaacagtaccaaagaagaacaccatcttttgcaatttcaaagagctcattggttgaagggtcaataggaagatatttcttgaggaactcatcttgtgctagatagtgatttatatgtgctacatatgatgctttctctgattcacttattgtgtgaagcaatgtggttgtagctgccttgaggaacgctgacgagttctttggactacttccggttctagaattcacaaatgtttggagtttcaagtagacctgtcatcattatattatatcactattacaagttatccttggatcaaaatttaacctgatcacaatagctgaaattgttctagtatgtttctagt

SEQ ID NO: 16064 - DNA, 443 bp, Glycine max
ctttgaacttcaaatgctttaggatgtgaatcacttctgttgtcctaaatgcctgcattcatgaacatatatagaagaaataattggagaggaatcgttggctacatgaatcactgaggtgggaggactataagacaagactggttggatgggaccaacagggaggcaagggcatatggacggccttggaggactttctcgctgatgctgattccgtgtgaaataaaatagatgtcaaacatcagaaatatttaaaatgatatatgacctctcgctatccgctgccttataattcatcagccacaaattaccttgcagttgtacttcgatgtaacgtgaacagaacatgtccagagcatgtttacaaaaatatggaatatcaattaatgcatgaatagacgttacgtttcactgaggcacgtctcatttggttacatgtggag

SEQ ID NO: 16065 - DNA, 428 bp, Glycine max
tatgctacaaatatttacaatagacctcctcaatctcagctgcaaaatcaaccacagcaaagcaattatgacctttccagcaacagatacaaccctggatggaggaatcatcctaacctcagatggtccagccctcagcaacaacaacagcagcctgctccttccttccaaaatgttgctggcccaagcagaccatacattcctccaccaatccaacaacagcaacaaccccagaaacaaccaacagttgaggcccctccacaaccttccctcgaagaacttgtgaggcaaatgactatgcagaacatgcagtttcagcaagagaccagagcctccattcagagcttaaccaatcagatgggacaattagctacccaattgaatcaacaacaatcccaaaattctgacaagctgccttctcaagctgt

SEQ ID NO: 16066 - DNA, 437 bp, Glycine max
tctacctctctgggcaatcttatgtggtggatcttaccttcaaaaccttttgaccttctaccattacctgcaagcaaacattgtgttctggagtaagcttgtcttccacagacaagtcgaaatcgatttttgggtcttcaaaacctaactccacctttctcttccccatgacaactatgcagcttgcggacaacatgaacggccttcccaagattacaaggatgtcagtatcttcagagatatccataaccacaaagtctgctgggaagatcaaatgttgtaccctgaccaacacttcaatcactccacaggacctggtaatggagcggtcagctaattgcacagtcattcgagtgggcataatctccaactctcccagccttctgcacatggagagtggcatcaaattaatgttggctcccagatcaatcatagcc

SEQ ID NO: 16067 - DNA, 435 bp, Glycine max
tgctaacccatggaagctgctaatatctcccacacttttttggggtgggtcattcttggatgaccttgattttctcagggtccacttggaccccatttctaccaactacaaaacctaagaagactatattatctacacaaaaggtacacttctgtatatttgcatagagggagtttttactaaggactgaaagaacttgccggagatgtcctaagtgatcatctaggctcctactgtacactaaaatatcatcaaaataaacaactacaaatctacctatgaaatcccttaagacatgatgcataagcctcataaaggtgcttggtgcattagtgagcccaaaaggcatcactagccattcatacaaaccaaacttggtcttataagcggttttccactcatcacccttgttcatcctgatttggtgataaccac

SEQ ID NO: 16068 - DNA, 424 bp, Glycine max
ttcttccacttcatgtttcttgtggtgtctttcttcatgctacagcttctgcccaaaattcttttggtagcttcttgcttttgagcatgcttcgagccatatcaaggattgttctatttttcctttctgtcacaccattctattagggggatcttggaactattaagggacatctgattccattctcttcacagaactctttggaagggaattctcctccttggttagtactcatggctttgatcttttgactactttctttctctattatagctttgaacttcttgaaggcggaaaagactttggattctttctttaatacatatactcatgttttgcttgagaactaaccactgaaaaggatgacataggcacttttatctagtgagcatggcttgattggcccacagacgtcaacatgtat

SEQ ID NO: 16069 - DNA, 385 bp, Glycine max
  unsure at all n locations
agctttgagtttattcaggcgacaatatctttttactcgtatgtctgattgagtcccgtcatataacgagacgctcgaaattgaatgttgaagctctgagccaattcaaacgacaataactttttactcggatgtctgattgaatcctgtcatatatcgagacgctcgaaattgaatgttgaacctctgagcgaattcaaacgacaataactttttactcagatgtctgatatagtctcgtaatatatcgagacgctcgaaattgaatgttgaagctctgagcaaattcaaacgacaataactntttactcggatgtctgattgagtcccgtcatacatcgagacgctcanaattgaatgttgaagctctgaggaaattctaacg

SEQ ID NO: 16070 - DNA, 432 bp, Glycine max
tcaacattcaatttcgagcgtctcgatatatgacttgactcaatcaaatatccgagaaaaaagttaatgtcgtttgaatttgctcagaggttcaacattcaatttcgagcgtctcgttatattaaaggactcaatcagacatccgagtaaaaagatattgtcacctgaattggctcagagcttcaacattcaatttcgagcgtctcgatatatgacgggactcaatcagacatccgagtaaaaagttattgtcgtttgaatttgctcagagcttcaacattcaattttgagcgtctcgatgtatgacgggactcaatcagacatccgagtaaaaagttattgtcgtttgaatttgctcagagcttcaacattcaatttcgagcgtctcgatatattacgagactatatcagacatctgagtaaaaagttatt

SEQ ID NO: 16071 - DNA, 433 bp, Glycine max
  unsure at all n locations
tatccaaactgaaacttcaacaaattaggcactgtctaattcgttatattttcagtacacaaaatcaaagtgatcaattctaaaagttataacataaggtacattgatagttccatccataaagggtttacttaaagttgcggatctgaaagtggtccagccatcaacgacacttctgttgccagtaataactgtaacatcctttccatcgccaaacagaacaatattggtcttataacttgggatttcaacattttcctcgtaagtcccttctttgacatagatcactgtcctaccagcactgtcatttggagcaaagttgatagcctcagtgatgaagctaaagtttcccgttccatcagcagccacaacaagctctcctccatcattgctntgcaagagacggcgaacggttttcatcgacaaccacaac

SEQ ID NO: 16072 - DNA, 424 bp, Glycine max
atacctttcatcatggcatgttgacataagctctttagttgagggtaaaatttgtcaaaaaagaaataatattcgacaaaaatataagagtttgagataaaatttgtcaaataaataatattatgatcttattaaaatgtttaatggggcttaattttaaaaattttctaagttttctaccataggagctctttttttcaccccatccatgttgtcacatgtgggtgaaaagaggaaagagagggatgggatttctcttgctttaagcataacgggccaaagtgggaggcccacacgaatggttattagctcagtagtaaagtgtgtccttgataattgtgtctgcttggagtggagtgagacatgtcattgaatagcaaggagatagccacttcgttatgaaattagaaaagttaagagccct

SEQ ID NO: 16073 - DNA, 422 bp, Glycine max
  unsure at all n locations
tgtgcctcttcacgtccggaatatgaatgtagcttatagatccaaagacccttaggtgctttgctgatggcttcttcccgttccaagcttcaattggagtcatgtcttttacagacttagttggacatctgttgagtatgtaaacaacattgtagattgcttcagcccagaatgtgttaggtagtcccttctccttgagcatcgatctagccatttccataactgtgcaattctttctctcggacactccattttgttaaggagaatatgcgactgtaagttgtcgctcaatgccttcatcctcacaaaatctttcaaactcgcgagaggtgtactctntgccgcgatcacttcttagtacttttatccgttttccactttgattntcagcaagggccttgaactttntgaatactccaaag

SEQ ID NO: 16074 - DNA, 295 bp, Glycine max
ctttagccaattcagacaacaataactttttactcgtgatgtcttattgagtcccgtaatatatcgagacgctcgaaattgaatgttgaacctctgagcaaactcaaacgacaataactttttactcggatgtctgattgagtcccgtaatatatcgagactctcgaaattgaatgttgaatctctgagccaattcaaacgacaataaatttttgctcggatgtctgattgagtcccgtgatatatcgagacgctcgaaattgagtgtggaatctctgagccaattcaacgaaca

SEQ ID NO: 16075 - DNA, 421 bp, Glycine max
atcttgtggaaccatggagtttagcctctttgttgtacacctatacagaacatgcatagttgtcatagcagcctcaccctataaactatgaggaagatttttctctttaagcatgcttctaaccatgttcaagattgttcgattgcttctttctacaatgccattatgttgggggtgtaatgagcagttacttcatgaactataccatgctccttacagaaaccttcaaattctccagatgtgaattcacctccaccatctgttcttaagatgttaatgcattttccagattgcttcttcacaagagctatgaagtctttaaaaatgttgaacacatcactcttggctttgattgggtagagccacaccttcctgctaagatcatctacaaaagacacaaagtatctattctctcctaatg

SEQ ID NO: 16076 - DNA, 379 bp, Glycine max
tatctttggattcagaggaacagatgatcctcccggaatcactgcaagtaaattatcccatcctcctcgaatacctccacagtgcctctctatcaactccttcagtggaatactcatttcctcctcaacagtgcaaggcttgttcacatgccccgacacacaaaacaactttgtcccagcattgttcttcctaccaaaactggcaaaccattcaggcccacgccttagaatggttggagaaacagcaacagtttccacatttgtgacagtggtaggacatccatacaacccagcattggctgggaagggcggcttcaatcttggtttaccttgtttcccttcaagactctccaagagggctgtttcctcaccacaaata

SEQ ID NO: 16077 - DNA, 422 bp, Glycine max
  unsure at all n locations
ttgcagcgtatgccactctactctaaattcttgtttgatatgttaacaaggaagcataaatatattcatcaagaaaacatcatagtgtaaggaaactgcagtgctatgatccaaaagatccttccacccaagcataaagatcttgggagtgtaactattccttgttcaattggagaagtcaatgtgggaaaagctcttattgacctgngagctagtatcaatttgatgccattctccatgtgcagaagattgggagagttggaaataatgcccattcgaatgactttacaactagctgaccgctccattagcaggccatatggagtaattgaagatgtgttggtcagagtaaaacattntatcttcccggcagactttgtggtgatggatatctctgaagatactgacatctttgtaatatt

SEQ ID NO: 16078 - DNA, 366 bp, Glycine max
ttcttgtaataaaaaacaagtaaataatctttacttagagatgaactaacatcttttgtctgacccaaacgatgagctctatccatcgcctgtagatccaatgttggattccaatcactctcgtaaaatatgactgtgtcagcagctgtcaagttgatacccaatccaccagctcttgtactcagtaagaacacaaaaatatcactcctgaaacagagatataaagaaacaagtcatcttcagtagtctcaccaaagtagacacattaaagcatgacaacacagacattacctgtgctggaagtctctaaccatgtctctgcgatcctgaatagtggatgacccatcaagtctaaaatatctatat

SEQ ID NO: 16079 - DNA, 393 bp, Glycine max
  unsure at all n locations
tgtcaaaaagggaagcaagttagaaactcttttcttagcaagaacattgtttctacttcgaaaccccttgaactacttcacactgatttatttggtccctctagaactatgagtttgggttgtaattactatggcttagttatagtagatgattactcaacgttcacatggactttgtttttgaaaacaaaaaatgaagcttttgatgcttttcgcaaacttgccaaggtgattcaaaatgaaatacgtcttaacattgtttcacttagaagtgatcatgaaggtgaatttcaaaatgagtcttttgaaatattttgtgaagaaaatggaatttaccacaattnttctgccccaagaacaccccaacaaaatggtgttgtggagaggagaaat

SEQ ID NO: 16080 - DNA, 410 bp, Glycine max
tatcaatgtggcagttccggggaccattgtctaattggcgatcaatacaaaaaaaatactcaatccatgggaaaggaatgaaaatcacacactttgcctcaactctgctaaagcaattggatgtacagtagtcaacattggcacccaggacttcattgaaggaagggtatgcttgtaggcattcaagtttccacccataaaagcagaattattgtgggcgtgtacactgcagaacaacaaaatttaagattaaatttaatttataaatgaaatcctttgttaagttatgaaataggaatttttttattctaaaatcaaatcctttggtcagaaagttataagaattttttctttttttttttttaatttaggtgtgatactacaaaaaatctggcaaatttgatatttct

SEQ ID NO: 16081 - DNA, 321 bp, Glycine max
tgctcttaaactctatacaagaatgaagttctgataccactcgatagacaggtggcctcagatatctttaagaatgggggttttgaattaagatatcaaagactattctccaattaaaattttaactctcttcttgagttagaaatttacccttaatatgaattactcaaaagataatttagagtaaacttctttatagccaatgatagatgacgatatataaaagaagtttaagggaaaagagaatgccaactcatgtgttatactggttcaggcacaccctatgcgctacgtacagtctccaagcagcccgcttgagat

SEQ ID NO: 16082 - DNA, 423 bp, Glycine max
tcaagtgatacagacagtgaaatcacttttgatgtgcttgccacatcctatagagaactatgcatcaaaagtgagaagattcttcagcaagaagcacaactgaagaaggtcattgcaaatctggaggctgagaaggaggcacatgaagaggaaatctctgaacttaaaggagaaattggctttctgaattctaaactggaaaatatgacaaagtcaataaagatgctgaataaaggctcagatgtgcttgatgaggtgctacagcttgggaagaatgttggaaaccagagaggacttggatttaatcataagtctgctggcagaacaaccatgacagaatttgttcctgccaaaaacagcactggagccacgatgtcacaacatcggtctcgacatcatggaacgcagcagaaaaggagcaaa

SEQ ID NO: 16083 - DNA, 380 bp, Glycine max
ttcttgcaagatggaagcaaagaaatctatcaatggggggtagaataaccctcattaattcagtcttaacagccttacccatctatttgctgtccttcttcaagatacctaaacatgtggtgcaaaagattgtatctattcaaaggaatttcttatggggaagtcaccaagactccaacaagatcccttggggaggcgccatttgcacatgaatcactcttgaggcaaaaatcaaggatcaaatggctcagggaaggtgacagtaacacatgcttctttcataaatccataaattttagaagacattataatgcaattcaaggaatattcattgaaagtatatgggttcagcaaccaaaattggttaaggaagaagctgt

SEQ ID NO: 16084 - DNA, 388 bp, Glycine max
atgatcgttgtgtgcatgcattcttgtgggatttggtgatagtgattgtgccggagatgtagatgatataataagtactaccggatttgtattttttatgggtgattgtgtctttacatggagttctaagaggcaaggcattgtgacactttctacttgtgaagccaagtatgtagctacaacttcttgcacatgtcatgccagttggctaagaagattgctggaggaaattcagttgttgcacaaggagagcacaaagatctatgttgatcatagatctgcacaagagcttgccaggagtccagtgttgcatgaacgaactaagcatatatatacaaagtatcatttcattgtagagtgcattaccaagacagaagattaattgact

SEQ ID NO: 16085 - DNA, 404 bp, Glycine max
tatactatatcgagacgctcgaatttaattatcttatatctcttgagaaattcaaatggtcgtaactttttacacggatgtccgattcgggcgcataatatgtcgagatgctcgaaattaaacaacgaaagctcttgagaaattcaaatggtcataacttttgacacggatgtcctattcaggcaaatcacatatcgagacgctcaaaattgaacaacggaagctcctgagaaattcaaatgcttataacatatagtgacactcgaaatgtccgattcatgcttataatatatcgatacgctcgaaatataacatgtaaagctctcgcgaaatctaaatggtcataacttttcacacggatgtacgattctgacgcataatatgtcgagaggctcggaattgaa

SEQ ID NO: 16086 - DNA, 407 bp, Glycine max
  unsure at all n locations
tattagagttttaacacactctttttaacacactctccactgttggtcctcaattaattgagaattataaaatcagaataatgactcatcatatgagtagtgggacctgccaaatttgtgatttttaagaaatttgagccaacaaaaaaaagtgttcaagagaatatgttagagacagtgttgctaccatttctctgtttaggaatggtgtttgtagttattagtgaaaatagaaatagaaaatattttccttatgtcaaacaggcttctgcattactatttttagtttttacaacattatgatagatcattatatattttttctttctctaaaacaaatgatttatttattgtcttgnggtggtgtatataaaaactgatcaacacattntacttttctttttttg

SEQ ID NO: 16087 - DNA, 365 bp, Glycine max
tggacactttcaatatgattgtcctacgttgtattagaaaccattttatgctgagatggaggataaagaggaacaagaggatgagctcttgttaataaccttcatagattgcatacaagggaagaaggatgagtggtttctagactcgggatgcggcaaccacatgagtagtaacaaggagtggttctcagaattggatgagaactttcggcacaatgtaaggcttggtaatgatactcacatatctgtgaaggggaaaggtagtgtttggatggttgtgaatgagattatacatgtaatcacacatgtatattatgttcttgaactcaagaataattcatcgagtatatgactgcttcaagaaa

SEQ ID NO: 16088 - DNA, 354 bp, Glycine max
ttcttctatagaagggtcggtcctaatttctctacaattgcatcacctctcaatgagctggtgaagaagaatgtggcatttacctggggtgaaaaacaagagcaagcctttgcttttctcaaagaaaagcttactaaggcacttgttctagctcttcctgacttttctaaaacttttgagctagaatgcgatacctctagagtgggagttggagctgtattgttacaaggtgggcaccctattgcttattttagtgaaaaacttcatagtgccaccctcaactaccccacctatgataaagagctttatgccttaataagagccctccaaacttgggaatatgaccttgtttcc

SEQ ID NO: 16089 - DNA, 418 bp, Glycine max
tatgctacaaacatttataatagaccccctcagcttataaaccaataacaacagaataattatgatctttcaagcaacagatacaatccagattggaggaatcatccaaatctgagatggacaagtcctccacaacaacaacagcctgtccctcccttacaaaatgttgctggtccaagcaagccatatgttcctcctccaatgcaacagcagcagcagcagtcacaattgttagtgcttagcactactgagtttaaaaaggttggctaagattttgttaaaacataagcacttagacaatgaaggaaagctggagttgctgcacatgatgaccaacgctatgtcaaggaataagatcgggctgcataatgcacaaggcaagataaagtgtcaagtgatgaattgaagttgaacgatc

SEQ ID NO: 16090 - DNA, 408 bp, Glycine max
tgtgcctcttcacgtctgtttatgaatgtagcatatatgatccaaagacccttaggtgctttgctgatggcttcttcccattccaagcttcaattggagtcttgtcttttacagactcaattggacatctgccgagtatgtaaacagcagtgtagactgcttcagcccagaatgtgttaggtagtcccttttacttgagcatcaatctagccgtctgcataactgtgcgattctttctctcggacactccattttgctgaggagaatatgcgactgtacattgtctctcaatgccttcatcctcacagaatctttcatactcgtgagaggtgtactctttggcgcgatcacttcataatacttttatccgttttccactttgattttcaacaaggaccttgaactttt

SEQ ID NO: 16091 - DNA, 364 bp, Glycine max
tttcttcaacatcagaccacttccagggtgctggaactacttcacatggacttgatggggcctatgcaagttgaaagccttggaggaaagaggtatgcctatgttgttgtggatgatttctccagatttacctgggtcaactttatcagagagaaatcagacacctttgaagtattcaaagagttgagtctaagacttcaaagagaaaaagactgtgtcatcaagagaattaggagtgaccatggcagagagtttgaaaacagcaagtttactgaattctgcacatctgaaggcatcactcatgagttctctgcagccattacaccacaacaaaatggcatagttgaaaggaaaaacatgactt

SEQ ID NO: 16092 - DNA, 402 bp, Glycine max
ttccgctcggatgtccgattcatgtgtatcacatattgagacactcgaaattgatcaatggaagctctcgagatattcaaatggtcataacttttaacaaggtggtctgattcaggcgcataaaataacgagacgtttgtaattgaacaacggaagctcgagagaaattcaaatggtcataacttttcacacggaggtccgactcaggcgcgtaatatatcgagatgttcgtaattgaacaacggaagctctcgagaaattcaaatggtcaaaacttttcactcggatgtccaattcaggcacatcacatatctagacgttcgcaatggaacaacggaagctcttgagatattcaaatggtcataactcttcactcgaatgttcgattcaggtgtatcacac

SEQ ID NO: 16093 - DNA, 378 bp, Glycine max
acgttcttaacaaatggcatgcgaagtgggtggaattcctagagcaattcccttatgttatcaaacataaaaaaggaaaaggtaatattgtagccgatgctctttctcggcgtcatgcattactttctatgcttgaaacaaaatcgattggacttgaatgtttgaaaagcatgtatgaaaatgatgaaacttttggagaaattcttaaaaattgtgaaaacttttcagaaaatggtttctttagacatgaaggctttcttttcaaagaaaacaaattgtgtgtgcctaaatgttctactagaaatctgcttatttgagaagcacatgaacgaggtttaatggggcatttttgggtccaaaatactctagatacattac

SEQ ID NO: 16094 - DNA, 379 bp, Glycine max
ggtgcttaagcttcttcaactgcacaaggctcttaatgtttgaagagtatccttgtggaaccttcacccgacgaagacactgacaaaaacttatcttctcctttttggacaaggtatggcaagctaggggcaagtaaattttcttcccattagaccttggatgcaactgtgatcgtatgcccatatcagctagatcttgacaggtattgaagccatccttcatcttgccttgaatgttaaggagagtcccaatcacactatcacaaacatttttctccacatgcataacatcaatacaatgtctaacatcaagatcagatcagtacgagagatcaaagaatatggacctcttcttccatatgcaactcttacttttatc

SEQ ID NO: 16095 - DNA, 425 bp, Glycine max
  unsure at all n locations
ntgctatctcttctctcctaacatcatggttaatttccattccgattcctcaagttgtgcatacatacttgcaatttgtttgttgctcggcaaagaaaggccaacaaatcataggcacacctgcagatatactttcaagtgtagaattccaaccacaatgggttagaaaggccccaactgatggatgagaaagcactttctcttgaacacaccaacttgttatatatcccctgtccttgatctcatcaaagaactcttgtggcaaagatatagattcacccattactacatctggtctcattatccataagaaatgttgcttgctatttgctagtccccaagcaaattctttcaagtgatgctctgtcatcaccgttatacttccataattaacatatatgactgagttaggttcccatttgtct

SEQ ID NO: 16096 - DNA, 411 bp, Glycine max
aaactcagctctgatgcccccttctctatacccactgtttatatccaatctcaggctcctcaaggtattggtaagagcaactcccccccatccaccctgcacatctgagatccaagcctctttaatcatacaatggtaccctttatgttcaagccaccagtccaccaccctaaaaggcttagggccccaatccaccatctttgtggccaagaagatcgggcaatgatccgaataatctctttgaagaacatgccgagaagcatcatgccacaaggatagccatcgatcagacaccatgaatctgcctagtctgctcttggcactgccattgggcctaaaccaagtgaaattgcctccaaaacatcgtatgtcctggagctccatctcaaatatccagacattgaactccga

SEQ ID NO: 16097 - DNA, 420 bp, Glycine max
tgctcgtcttgctgatatttatcatgcatacttttctgatgatgaccgacgaacaatgagggatcaacttgaaacttatgtgcttcaagagagaagaaatcttctttttccacttgtgaagatgttcaaagtttggctatgaagatggttcaaactgagaaacatttggtatttccattggtttataaacttattgagctagctttgatattgccggcgtcgacaacatccgttgaaagagctctttcagcaatgaagattatcaagtctaaattgcgcaataagatcaacgatgtgtggttcaatgacttgatggtatgtgacaccgagcgggagatattcaagtcgctcgatgatattgatattattcgaacatttaccgcaaagaagtctcggaaaggacacttgcctcgtatttta

SEQ ID NO: 16098 - DNA, 424 bp, Glycine max
tgcaaaatggaagcaaagatatctctctatgggtttaagaataaccctcattaattcagttttaacagcattacccatttacttgctgtctttttttagaatccctaaaaaagtggtgcaaaagatagttactattcagagaaattttctatagggaggtgattttgaggccaacaagatcccttgggtgaaatgggacacaatttgtcttcctaagaacaaaggggggttagggattaaagacttgatcaaatttaatgaggctttgcttggcaagtggggttgggagttggctaataattagaaccaactttgggcaagaattttattgtctaaatatagcggttggaatgaatagctctctggtagaaacagtagtgatttctctcattgatggaaagatctaaagattgtatttcaatac

SEQ ID NO: 16099 - DNA, 375 bp, Glycine max
tgttcttcgagcttatgcaaatggccataatatttgacttgggcatccgattacggcccataacatatcgagaatttcgaaaatgaacacagaatctcctagcgaattcaaaccacctaacttttgacacggatatctgattgccacccataacacatcgagactctcgaaattgaacacagaatctcctggcaaattcaaactgccgagacttttcacacgaatgtatgattgaggtcaaaaatatatctcaacgctcaaaattcgacaaagaagctttggggaaattccaattgtgatgacttttgactcgggcatccgattgaggcttgagatagaatctcctagcaaattcaaatggccataacatttgac

SEQ ID NO: 16100 - DNA, 427 bp, Glycine max
  unsure at all n locations
ntgagaaaattctaacgacaataactttttacgcttatgttcaattgagccccatagtatatcgagacgctcgtaattgaaaatagatgctcgtagcaaattcaaacgacaataacttttaactcggatgtccgatggagtcctgcaatatattgagacactcaaaattgaaaatagaagctctgagaaaattcaaacgacaataactttttactcgaatgtctgattgtgtcccgtagtatatcgagacgcttgaaattcagatcagaagttctgagcaaaatcaaacgacaataacttttaactcgaatgtccgattgagtcccgtaatatttctagtctcacgaaattgaaaacagaagctctgagcatattcaaatgacaataactttttaatcgtatgccgattgtgtcccgtagtatattg

SEQ ID NO: 16101 - DNA, 377 bp, Glycine max
ttgcatgcatttttattgacactattgataagtctcccatggaagcacctgatctgagtgatgctgaagcaaccaaggtttttcaaaagtacctagatgagtgccttactgctaagtgcattatcttggcatcaatgagttcaaaactccagaggcaacatcaagacatggacccatatgagatcgtcgaacatcttaagaagatgtacgatggtcaaagcaggacggctagattccagttatctaaggctctgtttagatcctcacttgctgcaaatgaaaaggttggaccccatgttcttaagatgattgatctcatagaacaacttgagaagttgggtgcactcttgggaaagagctttctcaagatttgatta

SEQ ID NO: 16102 - DNA, 352 bp, Glycine max
  unsure at all n locations
ttgcatgcattcttntggtgggacatgttgacttgctttccaatctgacattcgccacagatcctgccttcttctattttaagatcgggaatgcctctaacagcacctttgtcaatgattttcttcatgcctcttaagtagcacatgtccaaatctttgatgccatattctgactttatcttctatggacgatagacatgttgaggagtagctggtttcttgaggagtccataggcagcagatgtccttggacctgctgcccttgattagagcttcactcttctgcttcgttaccaagcattctgactttgagaagcttacattgaatccttcatgacactactgactgatg

SEQ ID NO: 16103 - DNA, 367 bp, Glycine max
ttgtcttcttgcaagatggaagcaaagaaatctatcaatggggggtagaataaccctcattaattcagtcttaacagccttacccatctatttgctgtccttcttcaagatacctaaacatgtggtgcaaaagattgtatctattcaaaggaatttcttatggggaagtcaccaagactccaacaagatcccttggggaggcgccatttgcacatgaatcactcttgaggcaaaaatcaaggatcaaatggctcatggaaggtgacagtaacacatgcttctttcataaatccataaattttagaagacattataatgcagtctaaggaatattcattgaaagtatatgggttcagcaaccaaaatt

SEQ ID NO: 16104 - DNA, 422 bp, Glycine max
  unsure at all n locations
tagacaacttanagaaaccaatttggaaagcatattgagcccaacattttacactcaagatatatctatgaaatttatttggatgaatatttgggttgaatagttaactgagcccattgcatttattatgtccgaatatattcaaaggatattgaagatatcatatgtttaacatttattattaagatttagagtttagagtttatatcattatgatatgtttttatcttgtctttggatttgtttcatttattagaactcttattttgttaagatttgttttctcttttaggatcaaaatcttattttatcatatctttagttcatataagattattgttttatcttatctttaggttagacactattaaaatttgttttccgtcacttgttntgtatttccctataaataggaagccatg

SEQ ID NO: 16105 - DNA, 379 bp, Glycine max
ttcttgccattacaccacttgaccattcaactaggctgcatcaagatgaagggaaaccatatgaagatgtagcatcctacagaagattgattgggaaacttctgtacttgaacaacactaggcctgacatcacatttgccactcaacaacttagtcaattcttaagtaaacctagtatgacacactacaatgctgcctgtagggttgttaagtacctcaaaggcagtcctggccgaggcctgttcttcccaagaaagccagaaatccagctactaggattttctgatgttgattggggtggttgcttagattcaaggaggtccatttcaggatattgcttcttcttgggagcatctttgatctcttggagagctaagaa

SEQ ID NO: 16106 - DNA, 351 bp, Glycine max
tgtttttatagaaggatcgttcctaatttctctacaattgcatcacctctcaatgagctggtgaagaaaaatgtggcatttacctggggtgaaaaacaagagcaagcctttgctttgctcaaagaaaagcttactaaggcacctgttctagctcttcctgacttttgtaaaacttttgagctagaatgtgatgcctctggagtgggagttggagctgtattgctacaaggtgggcaccctattgcttattttagtgaaaaacttcatagtgccaccctcaactaccccacctatgataaagagctttatgccttaataagagcccttcaaacttgtgaacattaccttgtt

SEQ ID NO: 16107 - DNA, 386 bp, Glycine max
aagtctgctcgcatgctttctttcttcaagcttgttcagacacaattttccaaaagcattaaggctatgcggtctgataatgctaaagaattagctttgactgagtttttgcataatgcaggagtagttcaccagttttcttgcccacacagacctcaacaaaattcagtaatagagaggcgccatcaacacctattgaatgtagcacgtgctttaatgtttcaagctcagatgccaatttattttttgggagagtgtgtatccacgacagcttacatcgtcaacagaacatcaagctcaaatttgcagaaccaatcaccatatgagttgctatatggtaaagtaccagcctatgatttgataaaggtgtttgggtgcttgtgcta

SEQ ID NO: 16108 - DNA, 378 bp, Glycine max
agcttcaagaataatgacatcatccaattatttatttcccgaagggaattctataaataggcctcctatttttaatggcgtgggttaccattattggaaaacccgcatgcaaatttttatagaggtaatagatctgaatatctgggaagcaatagaaattgggccctacattcccactatggtggcaggaaatacaaccatagaaaaacctagggaagaatcgagtgaggaagaaaagagattagttcattacaatttaaaagccaaaaatataattacatctgctttaggaatggatgagtactttagggtatcaaattgtaaaagtgcaaaagatatgtgggataccctacaattaacacatgaaggtacaacaga

SEQ ID NO: 16109 - DNA, 420 bp, Glycine max
  unsure at all n locations
tatgctctttnggaggcaataaacattttattgttatttattgttatactttaataagattatatcaaatggacataaaaagtgcattccacaatggactaatataagaggaagtctatgtagaacaaccccctgggtttgagagtaacactttccacaacatgtttttaaactcattaaagctttgtatgggctaaagaaaactccttgagctttgtatgaataccttagttcattccttttgataaatggttttgaaagaggaaaagtggatatagctctattctgcaaaaactatgactcctaatttatattagtacaaatctatatggatgtcatcatacttggtgctactaatgaacctctatgtgaggatttctctaagttaatgtacgttgaatatgaaatgagcatgatggg

SEQ ID NO: 16110 - DNA, 367 bp, Glycine max
gaggaaattcaaacgacaataccgtttttatttttgtcggattgagtcacgcaatatcgggagacgctggaaattgaagaccgaagctctgagcaaattctaacgacaataactttgtactctgatgtccgattgagtcacggaatatgtcgagacgctagaattgggataccgaagctctgagcatattcatacgacaatgcctaatgactcggatgtgggattgagtcacgtaatatctcgagacgctcgaaattgaataccgaggctatgagcgaattcaaacgacgaataactttttactcaggtgtgcgattgagtcccataatatgacgagaccctcggaattgaataccgaagctatgag

SEQ ID NO: 16111 - DNA, 334 bp, Glycine max
ccccaatttaatggatttttaaggtttgagaagtgaaattgagaatgaggtaaatttggagcaaactctcaccgcttacaaaaattccgggtagaaatttccaggatgtcacacaaacaaacatcaaaagaggatccatatacagtgaaatcatccataaacacctcgatgcaattttctaaaaaatcactaaaaatactaatcatgcaccactagaagataccaggggcattgcacatgccgaaaggcatcctcctgtaagcaaaagtgccaaagggacatgtgaatatggtcttttcttgatccttatgaacaatagtgatttgcatataac

SEQ ID NO: 16112 - DNA, 366 bp, Glycine max
tgcttaacattaggcatgtgaagcgggcggaattcctagaggaactcccttatgttatcagacataaatagggaaaaggaaatgttgtagccgatgctctctctcggagtcatgcattactttctatgctcgaaacataatagagcgcccatgaatgttagcaccgcatgtctgaacatgatgaggcttttggagaaatttttaaagcttgagataaggcatcagaaaatggctactttagacatgaatgcttactttccaaagaaaacacatggtggatgcctaaatgtgctacaagaaaatggcacggctgtgaagcacatgaatgagggttaatgcggcatttggtggtacataagagtctaa

SEQ ID NO: 16113 - DNA, 331 bp, Glycine max
tactaaggcacctattctagctgttcctgacgtttctaatcttctgagctagaatgtgacgcctatggagtgagacctaaagctgtattgaataccaagtgggcactctattgcttattttagtgaaaaacttcacggtgccacactcatctaccccacctatgataaaaagctttatgccttaacacgagccatgcctacttgggagcatcaccttgattcccacgaatctgtcattcatagcgatcatgaatcacttatgcacattcgacggcaacagcaagttaagccaaaagcatgctagatggctacagccctatagcacttccat

SEQ ID NO: 16114 - DNA, 428 bp, Glycine max
tgtatattgtcttattcaaaacaggaccactttcatattcttcccttgcattggcataatgttcaattactgtcaaggcttttggagcatctataacttgttcaactatattttgtgcaacatttcggttgataagctgcatcaaatctctctttttcctctgtattctttcagcacgaaagtattttttggttttcaattgcttggcaactttagtttgtatctctcctttgacaatcttcttccgtatcgcatccagagaagcccccttctcaagctcttctaacaattcttttcttgcttcctcaaattccatctaattcaattaagcagtgagtgccaaaaagtattgttagagaaaatgaaatatgattgacaatctaagtaattaatatttaatactcagcagaaaaaagaagaaatcagaa

SEQ ID NO: 16115 - DNA, 367 bp, Glycine max
ttcttatagattgtccaatccataagtggttcaaataattgtttttttatttttttttcaaaaatgttgtacaaattaatttaaaattaatgacccatacaagaatcaaaccttcgagatttgtgttattagcacaacactctaaccaactaaactaataaatgaattatattatacaataattaatgtcactatatgtaatactaaaatttttaatatttaatgcgcatgaaaatttagataataaattttgcaacaattaattttgatctaacaattaatttgtttacacatgttcgtagaaaaacaaccactagaccacatgtcattcacatattggataattgaacactgcagaagttgagtg

SEQ ID NO: 16116 - DNA, 397 bp, Glycine max
  unsure at all n locations
tgttcttcactcatcttctccttgaagtggcatcttcaatcacctttcctccttctctattctactatcattgatcttcaagaagaaaaggactccattgatgaagaagtttcaaggcgtacaagctccacatggggctacatcagacagcgtcgactgcgtcacgtcaccagaaaccaccaagtcctcggcagcatccaggtggaacctcccattcgtcggcgagaacgagtgtgctagcatccccaagctcccgtcgaacggctccccctggctgtggtcaccactgaagaacccgatcctaatgtcggtgcttgtttataaataagtgcaacaagtttttctttcattgtgnctctcttgtgtgccttttccatctgcaacaaagcttgttcta

SEQ ID NO: 16117 - DNA, 232 bp, Glycine max
cttgtctatacagtgcactgaatgaacaggcgaatacaaggccatacagaatctgaggaattgataccgctcacggttccccgacgcgtactacccgcaaacatggagtgtcactcctgaggtgcccattgaatgaacttactttcattgattgcgttgagcttactgaccgctctccagtcgtaactgctgacaggcccacttgcttattgagaactgcaacccgaacccg

SEQ ID NO: 16118 - DNA, 408 bp, Glycine max
  unsure at all n locations
ttcatgacttgcaatctttctatataatggtgatctatacgaaaatgccacaaatctatagggatgacattacattntggatgggtaatggcggagcatatggttcttgaatgtgatggtttcaaggtaagctgataaagcccatgactcacttcaactgtaccaatcttcactttggtgttgatatcctgcaaaacacaagtattagaggagaagattaactcggagctgtttgcggaaatgagtttggatatggatatgagattaaagctaaaagaaggtatgtatagaacatctttcaatgtaattgaagaggtgagatggacggttcccgagtgggtggcatgaacttcgtgtccatttggtaacttaactagaatgggtttaatttggtgatatgaatcaaaa

SEQ ID NO: 16119 - DNA, 413 bp, Glycine max
tcagtggcttagtgaagatgaaaaggtaaaagtgactcaacaggttgaggtgagtctcaccattgggagatataatgatagggtgttgtgtgatatggtcccaatggaagcgacccatgtgctgttaggaagaccgtggcagtatgataccaaggcagtgcatgatggcttcaccaacaaaatctctttcaagcaagatgacaacaaaattgttctcaaaccgttatctccgagagaggtttgtgtggatcagataaaaatgagagaaaagaaaaggagtgagacacttgagaggaaaaagagtgaaacacttgagaaggaaaagaggggaaagaaaaagagtgaaacacttgacagggaaaagagagaaaacatatagagtgaaacactcgagagggaaaagagagaaaaca

SEQ ID NO: 16120 - DNA, 379 bp, Glycine max
taaaggaagtgaaagaattagcatgggcagaaatgtcttcgcattgattggtaaatttgatccccaaatcccttataaatgtaaagatccaggtacattcaacataccttgtattatagggaacaaggagtttgacaatgccatgctagatttaggagcttctattagtgttatgcctttgtctatttttaattctctatctcttggtcctttgtagtcaactaatgtggtgattcatttagctaatagaagtgttgcctatcctgctggtttcatagaggatgtcttagttagagttggtgaactaattttccctggtgattcttatatttagaatatggaggaaggattttctcatggatcacttcccatcattcta

SEQ ID NO: 16121 - DNA, 416 bp, Glycine max
tatgattccatttcctgggaattcttggattggatgtttaagtccattggcttccccagcccagttctgtacttggatcatggagtgtgtttcttccacttcctttagtgtggcagtcaatggatccatttatggtcacttcaaaggacagcggggtcttagacaagaggatcctctctccccttatctgtttgtgctctgtttggagtacttttccagagatatgagcagcctcaaggatgatgccaattttaaatttcatcccaactatgcaggtattcagctatctcatttggcttttgcagatgatattatgcttctatctagatgagatatccattctgtgttaactatgtttgccaagcttcagcacttctgtagggtttcagggctttccatcagctctgataaatctg

SEQ ID NO: 16122 - DNA, 413 bp, Glycine max
taataagaggcatgctaagtgggtagagtttttatagcaatttccatatgtcatcaaacatacaaaggggaaagggaatgtagtggctgatgcactgtctatgagacatgctttacttgctatgcttgaaactaaactgtttggactcgagtctttgaaagacatgtatgtgcatgatgtggactttgctgatatttttgctgcatgtgaaaagttttctgaatatggttactatatgcataatggattcttgttaaagcaaataaattgagtgtgcctaagtgttccattatagagttgcttgtgagtgaatcacatgagggggggttgatgggacactttggggttcaaaagaccctggaaattctgcatgagcattttctttggcctcatatgaggcgtgatgtgcataa

SEQ ID NO: 16123 - DNA, 412 bp, Glycine max
tttctcagtcgtctgtaaggatgattgggtgtcataaagcggcgatgcctactgtagactgtttttctgtcatgtttaagttgtatgtaacttgtattttcttcacagatggggcatgcatgatgacccttaacactgtaaccgttgagattcccatatgctggaaagtcattaatggtacaaaaaagcattgcacgcatttcaaaggtctccttgcgaaacgcatcaaacactactaccccctcgtcccacaactttctcagatcttcaaccaacggacttagataaacatcaatgtcatttcttggctgtcttgagcccgatatcatcatagacaacatcatgtattatcgcttcatgccaatcaaggaggcaaattgtaaattactatcagaactggccatgaactgtg

SEQ ID NO: 16124 - DNA, 412 bp, Glycine max
tgctttatttaggtgggggcatgcaatcagtttaatatgttgctggggatggatatccagcctttttactgaaatagatattatagagaagcatatcaacaaaaagaactgaaaaaaaattaaaattgttgattttcatgtattttcctttttgttgtttatctatttcacctgtcccccttaaaatatattttcttaatatatcttactgtttccacttttgatttttgtgaccctcatttgaaccactttgttgttctttacaggacaaaattgaattaagggaaggatcttggtttgaaccattaaaagatatggaaggaaagctagtgggtcttggtagtaacccaccttatataccaagtaaagacatctctggtctacaagctgaagttggtaggcatgaacctag

SEQ ID NO: 16125 - DNA, 390 bp, Glycine max
tcttcttaaacaaggttccagtgtaatattgatgtgctataatgatctataaatagctaatactaattaataagcatagtttaataaactatattgtccttgaaatatttctttattaaattataagataattattataaaaacaaataattttacaagatatagggacttataattgtatgatcatataataacctgtacactccaatatttctattggttagtcttaaaaagataaaaccaaatttacaatgaatttatattttcaaaattaaaatcatgaaataaaagtttatctgatgaataaacaactagttgactttacacaaatataacgatggcatattaataattgtttaaatctctattagcacaaactttttgttttaa

SEQ ID NO: 16126 - DNA, 413 bp, Glycine max
  unsure at all n locations
ttgcctanaacaaatggttaccagaagataattttgaaaaaaaatcttttagaagggttttgaaatttgaattttaaagctgtaattgattaccattgatgtgtaatcgattaccaacaacgaaactcttgaaattcaatttgaaaagtcatgatccttcaaaatataattgtgtaatcgattaccagaaacctataatcaattactagtgaagaatttcagaataagctttttgaaaagacacatctcttcaaaccattttgaaaaggcacgaagggcctatatatatgtgtgtctgacttcaaaaagtaagagagagatattctaagagaacttcattgccaaattctctctcaacaactcttgggcaaacacttgtaaatctattgagacttcatccaggaatttcaaat

SEQ ID NO: 16127 - DNA, 373 bp, Glycine max
  unsure at all n locations
nttatgctagcttatttaattagtgttgagtaactttagtcttcaaaacagctgaacgatgtataatgacagaactcgacacatttataagatactttatcataaatctaaattttattttgtgaataaacacatatctcgaggtgttataatcatagtatttaaatgaattttaaactcttataatttttgatctaaattgtaattttggtcctaccttgttacccaaatacatgattctggtccatatatatttttgatgtgacatatggtccacatagatatataaattggcgattttggtccacttagaacatgataactaatgacttcaaataataaagttattatatgattctataattaattaaac

SEQ ID NO: 16128 - DNA, 415 bp, Glycine max
cttcactcggagatctgattcaggcgcataatatatcgagacgcttgaaaatgaacaacgaaagctctcgagaaattccaatgctcattatctttaactcggaggtctgatttaggcgcataatatatcaagacgctcgaaattgaacaacggaagctctctagaaattgaaatggtcataacttttcactccgaggttcgattcaagtgcatgatatatccagacgctcgaaattgaacaatagaagctctcgagaaattcaaatggtcataacctttaactcggaggtccgatttatgcgcataatatatcgagacgctcgaaatttaacaatggaagctcttgtgcaattccaatggacataacttttatctcggaggtccgattcgagtgaataatatatcgagacgatcg

SEQ ID NO: 16129 - DNA, 415 bp, Glycine max
  unsure at all n locations
ctcccagtttttaagttcttcctcaaaactgccctactcttatttcccaaagncctattaacaacattgcgtttgcccatcggtttgagggtgacaagaggatgaaaataacaatttagtgcccaacttgctccacaaagtcctccaaaaatggcttatgaacttagagtccctatcactaacaatgctacttggcaaaccatggagtctcacaatctccttgaaaaacaaatcaaccacatgggaagcatcaatcaactgtcttacatggaataaaatgagccattttagaaaacctatcaacaaccacagaaatggaaattctaccattgcttgtttttgacagccccaaaacaaaattcatggataaatcactccaaggaatactacggaattgacaatggagtatacaatt

SEQ ID NO: 16130 - DNA, 350 bp, Glycine max
gagcaagactacttcagactgatcaaagttatttattttatgaaaacctatcataacaactagaatgtattgcttgccatcaaccatgacattattacaaagactatcctatctagaccaatatgcttactaaagaagcataactgataaaaagctgtatgatgaacctcatccccatagtgatgtaatctccattggagcttgtatgcctaggatcctcttcattaatggattcctttgcttcttggaagatgaatggcagtggaatggataaggaagagagagaggagatgccacttcagggagaatatgagactagaagaagctcaccaccataggatgccatggat

SEQ ID NO: 16131 - DNA, 404 bp, Glycine max
tcttatccaaggcacattcttggtggtgaaacttcttcttccatggcttattcccttgtggatggtgcctcccctctactcttctcctttgccttccgctgcatctccatggtggaaaatcaccattgaagctcaaagatccagcctccatagaagcttcacatgcaagcttccatcagagatagtgcaactcgatgtcaaaacaacctttctccatggaagattggaggaagacattatgatgcaacaacctgaaggttttgaaatggtagggaagaaaaattatgtatgtacgttgaaaaggtttatatatgggttgaaacaatctccaacgaagtggtaccagagagtcgatgagttcatattactcatgggtcaacaaaagtgccaatgatcatgtatca

SEQ ID NO: 16132 - DNA, 418 bp, Glycine max
tctaagcctattacagtagtgtacaaccgaatactttcttcaaataaaagaaagaaggataaagggaaggtagtggttgttcctttaaaaattaccttttagtggagtatttataatgtatatgatcttacatggtatttatttgctctagtgagtgtagacagaacatagagttagttgagcaattaagttcaccacctccaaactccagagttttgtattttccatctcattttccacaaaatggttgggaacagtttaaagcatgcttgtggaaacaacatttgttctattggagaattccttcatacaacttgatgcgcatcatatttgtgcgtgtctcatctcttttgtttgggatattgttttggaagcaaggatagacaatgttagtgatcataattttattctacttatg

SEQ ID NO: 16133 - DNA, 416 bp, Glycine max
  unsure at all n locations
nttaataatggtgatgtcttatttatttgtatttatgtggatgaccttatctttatcggcaataacccaaatttgtttaaagacttcaaggagtccatgtctcgtgaatttgagatgacagatatgggactcatgtcatattacttaggaagggaagtgaagcaaatggaaaatggtatctttgtctcacaagaaagctacacaaaagaagtgttgaagaaatttaatatgcttgattgcaatcccgtgaacacacctatggaaggtggcttgaagttatcaaagtttgatgaaggagagaaggtagaccccacggtcttcaagagtcttgtggggagtttgaggtatctaaccaatacaaggcccgatattctatatgcggtgggagttgtgtgtcgctttatggaggctcctac

SEQ ID NO: 16134 - DNA, 417 bp, Glycine max
tgtatcatctactaactacaaattgattttttcatcaaatatttgtattctacaggataccaataccaaggtgaggattggtacaattgaagtgaatcgcggcctctatcaattcacccccgaagcaccaaaaacacataccatatgttctatcattacacacccaaagtgtctaatcctccctgtaaatctatggcattttcgtatgggtcacccctttcccgaaagattacaagccatgcaaacatactatcctttcttaaataataacaagagtttcatttgtaatacttgccattatgccaaacataagaaattaccttttcattctagcacatctcatgcattaaatcaattcgagcttttacatgttgatatttgggggtcgtgctccaaaacatccatgcatgggcaccg

SEQ ID NO: 16135 - DNA, 405 bp, Glycine max
  unsure at all n locations
tgcgcatgctctcatcagtggccagcctgtagaaccaggtccacaaccccctgacctccttgataagcaaataagcttattaacaccagttgtgatggatgcaacccctattggtgtaaagtttggggattgtagctctgatgttcccaagaactcgacctttaagagagctgacatggtgtctgttactttctggtctgcgtgccctcgtaatgaccttatgactgaaggtacattttccctggtggaatttctccaaggaaaggatatgtgggttcctgcttatgatgatgatgatttctgcctgcgcttcaagtggtcaagacctttcanactcagttctcatagtaaagctaccatagaatggagaatcccaaaggatgttactcctggtgtatacagaat

SEQ ID NO: 16136 - DNA, 408 bp, Glycine max
  unsure at all n locations
ntaactgaatttgcaacattccaaatgatttttaattggtgtaatcgattacaatatattggtaatcgattaccagtgcatctgaacgttgaaattcaaattcaagtgtgaagagtcacatcttttcataaaatgctttgtgtaatcgattacatggttatggtaatcgattaccagtgacaagttctgaataaaaagtcaagagatgtaactcttccaatggttttctcaagattttctcaaggttataactcttcaaatggttttcttaaccagacatgaagagtctataaaagcaagaccttgacttgcattcaaataacttttacaacttttgagaaatcttgaaacctttccttctcatctttcttcttcttcctttgccagaaagctttctatgttttctgt

SEQ ID NO: 16137 - DNA, 400 bp, Glycine max
ttgccaagagactattaactactctgtattgatcattggtgattatgtcgaagctattacccctaagagaggactaagacagggtgacctactgtcaccttacctgttcattctacgccccgagggtctatctaattaaaaccctaacaaagacaacaataagagaaggaactcatggtattaaggtttgtagaaggactccaatcctcccacacctcttatttgctaatgattttttattttttttataggagtctattattcttatggaggttcttacttctttatggcaaaatctctggtcaaatgattaattatcaaaagtctgagattttcttcatcgacaacactgaacacacaattagacaccacgtagcatctgtacttggtgttaacaaac

SEQ ID NO: 16138 - DNA, 427 bp, Glycine max
tggttcaactgagtagccatctgccccatctaatttgtcaaactcttaatggaggctcttgtctcttgctgaaattgcatattctggatggtcatttgcctcactaactcctctaaggaaggttgagaaggggcctgacttgcttgttgtctttgtcgctattgctgcattggaggaggaacatatggcctgcttagactagcaacattctagaaatgagggacaaattgttgttgctgctgttgttgttgtggaggatttgcccatctcagatttggatgattcctccaacctggattgtatttgttgcttgaaagattataattattctgctgttgctggtttttttgttgagggggtctattataaatgtttgcagcataggcttcaggttgctcattgactccaggttgctgcaaagaaagat

SEQ ID NO: 16139 - DNA, 419 bp, Glycine max
tatagaatatataatataagaacactgacaatataatagtctatacatgtttcctttgatgagtctaatgccattcttccaaggaaggattttttagatgatatttcagattccgtagaagatacacatattcatggaaatgattctaaagaaaaagatgaaggaagcaatgaggattctcaagataatggggctagaggaaataatgaacttccaagagaatggaaagcctcaagagatcatcccctcgacaacattattggtgatatatcaaaaggggtaacaactagacattctcttacagatttatgcaataatatggcttttgtatctatgattgaacctaaaaatataaaagaagccataggagatgataactggatcattgccatgcaagaagaactgaatcaatttgaaag

SEQ ID NO: 16140 - DNA, 387 bp, Glycine max
tgcttagtaaagctaggcactaacaatctccccctttggcaaattttgtctaaaacatacttagacacttcctgagcaggtacgagcagttatgcatgtgggatcagcaactttcattatcagagtaatcaagcacagcggaaattctgcaagttgcaagtcgtttccaggatgtcaagacatctcacatgacatcagctttctgcttctgctccccctgtctccatgctcttactgcagcatcttctatcagctactagtcttttccaggatgtcaagacatctcatgtgacatcagctttcccttgtctccatgctcttactgcagcatcttctatcagctactattagcttacatcagtcatcatcagcagcagcagtcttccc

SEQ ID NO: 16141 - DNA, 395 bp, Glycine max
agcttgatggcgtgtaactcaccattttccataatataacactttatgtctactatcattgttattatttctttcttcgtcattgagggaaacacttgggttgccagatccctccacctttgggtgtattctttgaaagatctgtgccccctttttgcacatgttctgtagttgcatcctatccgaagccattatactgacactgcctaacgaaggcaaccattaggtccttccaagaatagactcgggaaggttccaagttagtgtaccaggtaacagctaccccagtaagactttcttggaaggaatgtatcagcaattcctcatcttttgcgtatgcccccatcttccgacaatgcatctttagatggttcttggggcaagtattccccttg

SEQ ID NO: 16142 - DNA, 428 bp, Glycine max
  unsure at all n locations
ntgctcctaattcctaaaaaattccctctgcctagcatgatgtacggtacaggtaatgcacctctgattattgtagtggtgaacgaggtttatttagttgttaatcattccatgaacccttttccttacatcctctttgtagttgcagaggttcaatatctaagccaggaaaaaaaacttattagtcatctaaaatcttcacaaatgtaacctaatggtgccaaatagccacatgtttacctgctcaggagcacctttgctagatcgatgccaatttccatcagaatcaatgtaagttagaggagtcctcttgtccacaagattgaatggaagaaagtggacctccctaataccagctcgtgcctgatcagttcataggaaaagtgaatttatttatcaccattcatcccacatcataaaagataatc

SEQ ID NO: 16143 - DNA, 378 bp, Glycine max
agcttgttgagcttggaagactctctgcatcaatgaagaagttagagaaagatctcaagaacaagaataaatacgatgtatgttatccattcttgtggataaattcttcaaactttctgttatgggtttctttggactgtgattgccttacttttgtatgtgtattggttacctatatatggctgcaggatgagcaataccgcgccaaactaaacaagtcaaatgagaggactctatcacttatcaaagcatgaattgatactgtggtagcagtaagactgcttcaatcggcacccaagacagctactcctcgcgtaactggggcttttggatttgattcgtctctaatatcttgctatcaggtacctgctagtataa

SEQ ID NO: 16144 - DNA, 387 bp, Glycine max
  unsure at all n locations
ttgcttattaagtccgtctatggattgaaacaagcctcccgccagtggtatataaaatttcatgaggtcatttcttcattcagctttgaagagaatgccatgtatcactgtatataccagaaggtcagtgagagtaggatttgtttccttgtattatacgtagatcatattttgcttgcgactaatgataagggtatgctatatgaggtgaatcaatttctctcaaagaactttgatatgaaggatatgggagaggcatcttatgtcatangcataaagatccatagagaaagatctcgaggcattttaggcttgtcccaagaaacctatatcaacaaagctttagagagaattaacatgaaagattgttcaccaagtgtagctccc

SEQ ID NO: 16145 - DNA, 421 bp, Glycine max
  unsure at all n locations
ntaagagcaattcccttcttcttcttatcagtttcttttgttgatttagtctttgcaactccatctcatgttcctgtaattttcaaaataaagtagcaagagacataatagacaaatctctagattctataatggttgttacttttggttgcctcattttgaaaagttcttcctaatgaagcaagatggttaactatatgtgtgaatcttttctgcatatcttgtatactttcatttgtcttcatcctaaataattcatactcatgagttagagtatttatcctagatcttttgacatcagttgttccctcatgtgtaacttgtagagtgtcccacatatccttagcactcttacaatttgacaccctanaatattcatccattcctagggcagaagtaatgatattnttagcctttaaat

SEQ ID NO: 16146 - DNA, 416 bp, Glycine max
  unsure at all n locations
tggcattcccattggtggaaggaccttagttttctttataatcagtctgatttccacagtatccagtagaatatggtatggaaggttggttgtggggacaaaatcaaattttggcaagattcttgactgagtgagggctgtaagcatttcaaaaaaagattcttggcaatatggaaggaaggttagtttattaataatattcaaagaaagattctcagagtagaacccgtgcagaccaaccctggatgggattcagttttcttctcttggccaagggcagaaggaaagccttgctgctagattctctgaagtggaaattaagtctgcagtttgggcttgtagtggagataaaagccctggcccgtatggtttgaacttcaactttatcaagtagttntgggaaattctaaaacctg

SEQ ID NO: 16147 - DNA, 390 bp, Glycine max
agcttgtatggttaaagtctcacgattgtcacgtgctcatgcaacaattgttagccatggctatgcgagacatcttgccaaacaaagtcaggttaacgataactcgcctgtgctttttcttccatgctatatgtagcaaagtcattgatccagtaatgtttgatgagttggaaaatgaggccacaattatactgtgcctgttggagatgtattttccccctgctttctttgacatcatgattcacttgattgtgcatctggtcagagaaatcaaatgttgtggtcctgtttatctacggtggatgtacccggttgagcgatacatgaagatcttaaaagggtatacaaagaatctatatcgtacagaagcatctattattgagaggtaca

SEQ ID NO: 16148 - DNA, 427 bp, Glycine max
  unsure at all n locations
tgtaatcgattacatatatactgtaatcgattaccttagttgattttcagaaaatactctcaacagtcacatgtttttacttggttcttgaatggccatcaaaggcttatatatatgtgacttgagacacgaatttgctaagagtttttcagaacaaaaaggtcttatcctcttaaaaagcaaaatcgttttatcctcttacaaattccttggccaaaacacttgtgattcaataaggatttatttgagtgctcaaattgttcaatctatctctttcaagagagattacttcttttcttcttctttattctgaaaaaggattaagagaccgagggtctcttgttgtaaagaaatctgaacacaaaggaagggttgtccttgtgtagttcagatcttgtaataggctnttacaagatagtggaactct

SEQ ID NO: 16149 - DNA, 385 bp, Glycine max
ttgcttctaaactttatacaagaatgaagctctgataccacttgttagacaagtggcctcaaatatcttaagaagggggggggggttgaattcagatattccaaactacttccccaattaaaaatctattacactttttaatcaagttatgaattcccttaatgataatcttcttaaatattaattcaaataaaacaatttgaatatgaatataaaacaataatatataaaggacgattaatggaagcgagaatgcaaactcggttttatactggttcggccacacccttgtgcctacgtccagtccccaagcaacccgcttgagagttccactatcttgtacattgcttttacaagttctaaacacacaatgacaatccttcca

SEQ ID NO: 16150 - DNA, 411 bp, Glycine max
  unsure at all n locations
ntnttttctctattttttgtgagctacttagttgatattgttttgttgattcactatcacatgaattatgaagccaggaacattctatgccttgccacaaagtcctcagctatttaagcaaatgctaatggtagctggttttgacaaatattatcagattgcaaggtaatattttcgtcttatgtttgagtctttatttgtagcttggcttcttttacgagaatatgttattgtcccctatgtagtgctttttcctttttctcttttaagttttttccctatattaatatgcattttgtttaagtgactttcataaactaagaatatagaatgcttgtttttgtaagctatactaaacttaaaattgaaacaattatgatgcaagtgacttttctttttggataaaatgca

SEQ ID NO: 16151 - DNA, 386 bp, Glycine max
tagctttggagtttccaagtgccaattcgtcctcttctttagtccagtcttcttctggcttcaattcatcagtgggctttccttctgtgtccagcatcttgggatgttcccagcctttgatgacagctttccaggttctgctatccagtgatttgaggaaggccaccattattgctttccagtattcatagttgcttccatcaagaattggtggtctgttcactggtcctccttctttctccatgttcatcagaatttatctccccagatctcactctgtgatttcgagtgttggctctgataccaattgaaattctgataccaggggacagatgtcgtacaggatgtcacgacatcacgcttcagaacatgcagattgtatgtgt

SEQ ID NO: 16152 - DNA, 391 bp, Glycine max
  unsure at all n locations
agctttttcctcgttggaaggcaacgacaaagggatctcagatagtttcaggcaagcttgccaagcggttctatggacccttccaagtcatagaatgcattgggctcgttgcatataagttacaattgccataggaagttaaaatacaccccgtattccactattccaagctgaagtctttttgcggttcaccagaaaatatggcgggaattgcctggcacaaggagttactcaacgaccaacccctcgtgtttccattaggtatcttggattaccgtagagcatccaccgaggatccctgngaggtgctagtgcaatggaatggtctctcacctgatgatacctagtgggaggattggaatcagctgtgtgaaaactaccaccttgagga

SEQ ID NO: 16153 - DNA, 417 bp, Glycine max
tgatgagaaataaatgttttgcttggtacaacatctatgttatttaatgagatcattacattatttgtgtcttaataggaagtgaaggacatacattagaggaagccaaatctatcaatctatccttgagtgcattggggaagtgtattaacgcacttgcagagaatagtgcacatgtgccatttcgtgactcagcttactagattgctacgtgattcatttggaggtaagattcagtgagtataataattcatattttgtctttgttcatttatacaaagcagtaagatttggcaaaatactcttcctaactttcaggacgtgagacagatgaagtcgagcccataccggatgctctgcctaatctggaacagtaagctgcctaatgtgtctttgatgcattttagaagtctaatc

SEQ ID NO: 16154 - DNA, 397 bp, Glycine max
agcttcatgaaaaagatggcctcagcaaattccttatttccagaaggaaattctatcaacagacctccaatctttaatggagagggttaccactactggaaaacccgaatgcaaatttttatcgaggcaatagatctaaatatctgggaagccatagaaatagggccttatatacccaccacagtagaaagagtttcaatagatggtagttcatcaagtgaaagcataaccatagaaaaacctagagatagatggtctgaagaggatagaaaacgagtacaatacaacctaaaagccaaaaacataataacatctgccctaggaatgggtgaatatttcagagtttcaaattgtaagagtgctaaggaaatgtgggacactcttcgattaacacatg

SEQ ID NO: 16155 - DNA, 426 bp, Glycine max
tgtgggatggctttgaagattgatatcaataaggcctttgatagggttgattggaattatttgttggttgttatgatcaagatgtggtttcatcagaaatgggtggattcgatgaaactttgccttgggtctacgcaattctcagtaatggttaatgaggattctttgggacctatttctcctaggagagggctaaggcagggtgaccaattgtcaccttacctgttcattatttgcactgaaggtctttcttcccttctaaaaaaatctgagaggagtggtgagttacatggtatcaaggtgtgtaaaggagtccctgtcctctcacaccttttacttgttgatgattgtttttgttttgcagggtaaatgatattgagcatattgctttgaaagctattctagattcctatggtgaaaattctg

SEQ ID NO: 16156 - DNA, 384 bp, Glycine max
agctttaaaagattggctaagattttgttaaaacataagcacttagacaatgaaggaaagctggagttgctgcacatgatgtccaacgttatgtcaaagaataagatcgggctgcacaatgcataagtcaagataaaatgtcaaatgaagcattgaagctgcaggatccacgatgtcggatacgatgtcctgacatcttgcccgaaaatactggacacatgaatctgttatatctttaacagattattgtgcagttagcaagagataagaagatctatctttatgaacgaattaaaagataattaaagttcgaatttcaaagtagaagagttcgttcagggattaaagattatagataaaaactaaaagatcaaactgtatctt

SEQ ID NO: 16157 - DNA, 333 bp, Glycine max
tttggcttttaaatgccattaagaggttcaactaccccattcatcttgggcctgcatgggggggaattatggcggtggaatcttgaaacctcacacaattcctttatcattttggtggtcaaaatggtggcattatttggataatcttcttgggccacccataccggcagaatatctctttcttaatgaacttgaccaccacacttcctttgtacaactggcatatgaagcagcttcaacccatttggtgaagtaaccgatctgcaccaaaatgaagcgacgtctattcggagcccttggctcaataggcccaatcacatctattccccacat

SEQ ID NO: 16158 - DNA, 287 bp, Glycine max
  unsure at all n locations
tatagaaactcaagcttctcgagaaattcgaatggttataacgttttcactcaatangtcctgatgcggcggacatcaactcatgtagacgctcgaagattgaacaacgcacgctctcgagaaactcgaatggtcataacatttcgcacacatgtccaaatctgtgacctaacatttctagacactccgcactggctggataaagatcttgtcatatccaaactgcagtaacatcgcgcgcgccatgcctatataagctcgcgagcaacggcactcccccccaacat

SEQ ID NO: 16159 - DNA, 382 bp, Glycine max
agcttcaagaaaaagatggcctcagcaaattccttatttccagaagggaattctatcaatagacctccaatctttaatggagagggccaccactactggaaaacccgaatgcacatttttatcgaggcaatagatctaaatatctgtgaagccattgacatagggccttatatacccaccacagtacaaagagtttcaatagatggtagttcatcaagtgaaagcataaccatagaaaaacctagagacagacggtctgaagaggatagaaaacgagtacaatacaacctataagccaaaaacataatatcatctgccctaggaatggatgtaatattcagagcttcaaattgcgagagtgctaaggaaatgtgggacactc

SEQ ID NO: 16160 - DNA, 388 bp, Glycine max
tgtagggttaaagtctcacgattgtgacgtgtttattcaacaattgttagtcgtggctatacgagacatcttgccaaacaaagtcaggttagcgataactcgcttgcgctttttcttccatgctatatgtagcaaagccattgatccagtcaagtttgatgagttggaaaatgaggccgcaattatactgtgccagttggagatgtattttccccctgctttctttgacatcatgatttacttgattgtgcatctggtcagagaaatcaaatgttgtggtcctgtttatctacaatggatgtacccggttgagcgatacatgaagatcttaaaagggtatacaaagaatctatatcatccagaagcatctattgtagagaggcacatt

SEQ ID NO: 16161 - DNA, 395 bp, Glycine max
agctttgagcaaattcaaacgacaataaccttttactcggatgtctgattgagtcccgtaatatatcgagacgctcaaaattgaatgttgaacctctgagcaaattcaaacgacaataactttttactcggatgtctgattgagttccgtcatatatcgagacgctcgaaattgaatgttgaagctctgagccaattcaaacgacaataactttttactcggatgtctgattgagtcccgtagtatatcgagacgctcaaaattgaatgttcaacctatgagccaattcaaacgacaataactttttactcggatgtctgattgagtcccataatatatcgagaggctcgaaattgaatgttgaacctctgaaccaattcaaaagacaatatctt

SEQ ID NO: 16162 - DNA, 429 bp, Glycine max
taaacattcaatttcgagcgtctcgatatattacgggtctcaatcagacatccgagtaaaaatttattgtcgtttgaattggctcagaggttcaacattcaatttcgagcgtctcgatatattacgggactcaataagacatccgagtaaaaagttattgtcgtttgaattggctcagagctttaacattcaatttcgagcgtctcgatatattacgggactcaatcagacatccgagtaaaaagatattgtcttttgaattggctcagaggttcaacattcaatttcgagcgtctcgatatattatgggactcaatcagacatccgagtaaaaagttaatgccgtttgaattggctcagaggttcaaaattgaatttcgagcgtctcgatatattacgggactcaatcagacatccgagtaaaaagtt

SEQ ID NO: 16163 - DNA, 423 bp, Glycine max
tgtaaggttaaagtctcacgattgtcatgtgctcatgctacaattgttagccgtggctatacgagacatcttgccaaacaaagtcaggttcacaataactcgtctgtgctttttcttccatgctatatgtagcaaagtgattgatccagtaatgtttgatgagttggaaaatgaggccgcaattatactgtgccagttggagatgtattttccccctgctttctttgacatcatgattcacttgattgtgcatctggtcagagaaatcaaatgttgcggtcctgtttatctacggtggatgtacccgattgagcgatacatgaagatcttaaaatggtatacaaagaatctatatcgtccggaagcatctattgttgagaggtacattgcagaagaagccattgaattttgttcagaatactt

SEQ ID NO: 16164 - DNA, 392 bp, Glycine max
agcttctaatgtatgtaagatgtgtattgcctctaaatgagctacaggtgcataagtttctttgtagtctattccttcttgttgagagtattctttagcaactaaccttgctttgtttttcacaacctttcaattttcattcagtttggtttgaaagactcatttctctccaatagctttctttctttttggaaattcgactgactttcaaacatcattcctctgaaactgatcaagctacttttgcattgctttaacccaattgtcatcctgcattacatcatcaatgtgtttgggtttcatttcagaaatcaatgcaataggtccttatgttctgagtgatgatcttgtttgaacatgatcaactagatcaccaataatttgactttttg

SEQ ID NO: 16165 - DNA, 327 bp, Glycine max
atcttacgctccttcaactgcacaagactcttaatatttgaagagtatacatgtggaaccttcacctgacgaagacactgacagaaactcatcttatcctttttggacaaagtatgacaagctgctggcaggttgattgtattcccatcagaccttggatgcaactgtgatcgtatccccatcttagatacatcttgacggagattcaatccatacttcatcttgccttgaatgtcaaagagcattccagtcactctgtcacgtacatttttcttctgatgcatatcatccgaccaatgccttacgcttagatgacaccatgactgc

SEQ ID NO: 16166 - DNA, 372 bp, Glycine max
tgcttttgagaaattcaaatggtcataacttttcacacggatgttagattaaggcgcatcgcatatagagacgctcgaaaatgaacaacggaagctctcgagaaattcaaatggtcataacttttcacactgacgtccgattcaggcttataatatattgatatgctcaaaaataaacatcggaagttctagagatattcaaatggtcataatttttcacatggatgtccgattccggcgcataatatgtcgagaggctcaaaattgaacatcggaaggtcttgagaaattcaaatgtgcataacttttcacacgaatgtccgattaaggcttataatatatcgatacgctcgaaattaaacaacggaactc

SEQ ID NO: 16167 - DNA, 410 bp, Glycine max
tgtagggttaaagtctcacgattgtcacgtgctcatgcaacaattgttagtcgtggctatacgagacatcttgccaaacaaagttaggttagccataactcgcctgtgttttttcttccatgctatatgtagcaaagtcattgatcctgttaagtttgatgagctggaaaatgaggcctcaattatactgtgccagttggagatgtattttccccgtgctttctttgacatcatgattcacttgattgtgcatcacgttagagaaatcaaatgttgtggtcctgtttatctacggtggatgtacccggttgagcgatacatgaagatcttaaaagggtatacaaagaatctatatcatccagaagcatctattgttgagcggtacattgtagaagaagccattgaatttt

SEQ ID NO: 16168 - DNA, 387 bp, Glycine max
agctttatagaaacctttgctttttttgctagacttgaagctataagaatcatgctttcctttgctactcataaaaatataaagttatttcaaatggacgttaaaagtgctttcttaaatggctttattgaagaggaaatatatgtcaaacaacctcttgggtttgaagatcatactcttccagaccatgctttcaaacttaaaaaagctttgtatggtctaaaacaggaaccacatgcttggtgtgacagactgagttcatttctcttagaaatggttttattaaagtcaaagtggatacaactctttctaaatgagaagttggcaaagatttcattatagttcatatgtatgttgatgatagtatttttgaagctactaatgaat

SEQ ID NO: 16169 - DNA, 393 bp, Glycine max
agcttttacctttcattttaacccttagaacttctcggccaacaatgtcatagataaagaaatgttgatgttcaaaggacactttaaatccctttttaatcaactgacctacacttagcaagttttggtcaatgttaggtacataaagaacatctgatattagtttgatacctgaacacgttgaaattgcaacaattccttttccttttactggaatatagccaccattcccaattttgacctttgagacattagttggcttcaaatccttgaatagagtcttatcatatgtcatgtggttcgtacaaccactaccaatcaaccaactttcacttgattcactactcaagaagcatgtggccacaaacagttggtcctcctcgtcttgattag

SEQ ID NO: 16170 - DNA, 432 bp, Glycine max
ctcacgcttcatgcttaactatgtatggcaaaacttcattattgttgttcatgacatacaagtgagcttgtaacagatcttctacacttggagtgatcacatgcagtccttttgaacccttaccacccactttgtcatcatgccgagactcaggaagcccaacaggtttagccttctctaagtattctgaacaaaattcaatggcttcttctgcaatgtacctctcaacaatagatgcttctggacgatatagattctttgtatacccttttaagatcttcatgtatcgctcaatcgggtacatccaccgtagataaacaggaccacaacatttgatttctctgaccagatgcacaatcaagtgaatcatgatgtcaaagaaagcagggggaaaatacatctccaactgacacattataattgcggcctcat

SEQ ID NO: 16171 - DNA, 393 bp, Glycine max
ttgctttttccttattcctcaaagaaaaggccaacgtatttgcatggaagccggtggatatgttgagcatagatccaaactttttctgtcataagttgatagtaaaccctttagtgaaacctgtgtgtcaaagaaggaggaaaatgactctcgaatgcctagaggaaattgaaaggcaagtgaaggagttgctaaggaaattgaaaggcaagtcaacccttcagcgaaacctttcatacgacttggctggccaagatcatcctagttaacaagcataacggaaaatggagaatgtgcattaactacttgatctaaacaaacattgtctgaaagactcatatccgcttcccgacatagataaaatggcggatagatctttcgactactgatatt

SEQ ID NO: 16172 - DNA, 426 bp, Glycine max
taagctctttcaattgcacaaggctcttaatatttgtagagtatccttgtggaacctttacccgacgaagacactgacaaaaacttatcttctcctttttggacaaagtatggcaggctgggggcaactaaattttcttcccatcagaccttggatgcaattgtgatcgtatgcccatatcagcgagatcttgacgggtattcaagccatccttcgtcttgccttgaatgttaagaagcgtcccaatcacactgtcacaaacatttttctccacatgcataacatcaatacaatgtgtaacgtcaagatcagaccagtacggaagatcaaagaaaatggacctcttcttccatatgcaactcttacttttatccttcttttgggtctttccaaatacaatattcaggtgttgaacccgctcatata

SEQ ID NO: 16173 - DNA, 381 bp, Glycine max
ttgttttttatgcattagcctgagcaatctttgaatctcaagccaatttgaattgcatgtgaaagttatgaacaaattaggaaacccaataaccccacaaattgtcattcaatcaaaatatagttgatccatatatctttgatttcgaacaaaagttaagggtagaatgactcttttccctttatttgacccctgattttgggtctgatcataacattactgcaatttgttggattcatcaactcttaattattttttgtgagtcctgatgaaatacaatctttcggactccatcatgcaatatctgtcatctacaaattgttgaaaaagtttcctagatctcaacattgtccttcatcttttctggtatgaatacaaaaa

SEQ ID NO: 16174 - DNA, 389 bp, Glycine max
agcttttatccaattaagacgacaatatctttttactcggatgactgattgagtcccgtcatatatcgagacgctcgaaattgaatgttgatgctctgagcaaattcaaacgacaataatattttactcggatgtttgattgagtcccgtaatatatcgagacgctcgaaattgaatgttgatgctctgagcaaattcaaacgacaataactttttactcggatgtctgattcagtcccgtcacatattgagatgctcgaaattgaatgttgaagctctcggccacttcaaacgacaacaacattttactcggatgtctgcttgagtcccgtaacatatcgagacgctcgaaattgaatgttgaagctctcagccaattcaagcgacaa

SEQ ID NO: 16175 - DNA, 426 bp, Glycine max
tagtaaagctaggcactaacagaatttgctcaatgcatcaacattcaatttcgagcttctcgatatattacgggactcaatcatacatccgagtaaaaagttattgtcgcttgaattggctaagagcttcaacattcaatttcgagcatctcgatatgtgacgggactgaatcagacatccgagtaaaaagtcattgtcgtttgaatttgctcagagcttcaacattcaatttcgagcgtctcgatatgttacgagactcaatcagacatccgagtaaaaagatattgtcgtttgaattggctcagagcttcaacattcaatttcgagcatctcgatatatgacaggactcaatcagacatccgagtaaaaagttattgtcgtctgaattggctcagagcttcaacattcaatttcgagcgtctcg

SEQ ID NO: 16176 - DNA, 422 bp, Glycine max
  unsure at all n locations
tgtaaaaagggaagcaagttaaaaactcctttcattttaaaaacgttgtttctactacaaaaccccttgaactacttcacatcgatttatttggtccctctagaactatgagtttaggtggaaattactatggcttagtaatagtggatgattactcaaggttcacttggactttgtttttgaaaaccaaaaaaagaagcttttgatgcttttcgcaaacttgccatggtgattcaaaatgaaaaaggtctcaacattgtttcaattagaagtgatcatggaagtgaatttcaaaatgattcttttgaaaacttttgtgaagaaaatggaatttaccacaaattntatgccccaagaacacctcaatagaatggtgttgtggaaaggaaaaatagatcccttaaagaaggtgcaagaaccct

SEQ ID NO: 16177 - DNA, 386 bp, Glycine max
  unsure at all n locations
ttgcttttaccaaagagattttactctctggtaatcgattaccagtggcatgttttgttttcaaaaagctttcaactaaatttacaacattccaatcaatttcaaaatggtgtaatcgattacaatatattggtaatcgattaccagtgagtttgaacgttgaaattcaaattcaaatgtgaagagtcacatcctttcacaaaaatgctttgtgtaatcgcttacaatgatttggtaattgattaccagtgataagttntaaacaaaaatcaaaagatgtaactcttccaatggttttcaagtttttctaaaggttataactcttctaatggttntcttgaccagacatgaagagtctataaaagcaagtccttaacttgcatttt

SEQ ID NO: 16178 - DNA, 426 bp, Glycine max
  unsure at all n locations
tagttcctagcttagccgataaggttttccaaaagtgtgctaaggaacttaacatttctatctgacacaatggtcctaggaaaaccatggagtctcacaacttcccttaaaaagagttttaagatgtgggaagcatcatccatcttgtggcatggtataaagtgtgccatcttgctaaacctatccaccaccacaaagatagagtctacacctctttgggttctagaaagcccaaggacaaagtccatactaatgtctacccaaggtgcagatgggatgggtaagggtgtgtatagcccatgaggcatcaccctagacttggcttgtaaacaagccacacacctagtgcaaagcttatggatatctttcttcacacggngccaataaaacttgtctctgagtatgacaagggtcttgtctatccca

SEQ ID NO: 16179 - DNA, 388 bp, Glycine max
agcttgtgttagttgtatggccttagccaaggaaaacaagaacaaccaaacactttcataaaagagtaatcaggttgtttgttgaatagtttctgataaggaacttcattatttatagcatatgagggcaatctgttgatgaggtaaatgcttgagacaaaggcatggtcccaataatgaaaaggtaacttggcttgagatagaaaagtgagacccaactccacaacatgtctgcgcttgctttctactactccattttggtgatgagtatgatgacatattagtttgtgctgaataccatgctctgtcaagaattttgtgaaaggtctgaactcccctccccaatcaaactgaatagccttgatagacatattaaacttatttgaaa

SEQ ID NO: 16180 - DNA, 381 bp, Glycine max
ttgcttataatatatcgatacgctcaaaattaaacatcgaaaactctcgagaaattcaaatggccgcaacttttcacacggatgtccgattcggtcgcataatatgtcgagaggctcgaaattgaacaacggaagctcttgagaaatttagacggacataactcctcacacggatcgacgacccacgcaaaccacatgaatagacgctcacaatcgtacatcggctgctcctgagaaattcaaacgatcataacatctaacatggatggtcaatcaaggctcgtcacatattgagacactggaacttgtactgcgtgagctgtggtgcaattctagaggccatatctgtttacaccgcgagccgactaagacttatcatat

SEQ ID NO: 16181 - DNA, 355 bp, Glycine max
  unsure at all n locations
gaaactcagctgaatcggacatccgtgtgaaaagtatgaccttttaatttctcaagagcttccgttggtaaatttcgagcctctcgacatattatgcgcccgaatcggacatacgtgtgaaaattcatgatcatttgaatttctcgagagcttccgatgtttaatttcgagcgtatcgatatattacaaccctgaatcggacctcagtgtgacaagttatgaccatttgaatttgacgagagcttccgctgctcaacnnccaacatcactataccngacgcgcccaaatcggacattcgagtgaaatgttatgaccatttggatttctcaagagattccgttgtttatttttgag

SEQ ID NO: 16182 - DNA, 414 bp, Glycine max
ttacatcccatgttgtgataaaatcttttatataattagttatgttgaggttatgaaatgatgattcaaactgtgagtatgtgataaattgaacatgtgacggatgatgaaatacatgtgtattgagatgagatgtgtgtattgagttgtgaactataaactatgcaatcacacaattgtaagaccctttaagggcgacgagtattgtgatgggatccactgtgggaatccgacgagttaaaatgattttgaaaacaattgagtaaatgtgtgtatttcatagttcatagataaagtgtatatgattcatgaggtgtgataacatgttaaattgtgattataccattgcgattaagattaagtgtatgtgataaattgagtatgtatatgattgagatatatatgtacattgaa

SEQ ID NO: 16183 - DNA, 384 bp, Glycine max
  unsure at all n locations
agcttcaacattcaattttgagcgtctcgatatatgacgagactacatcatacatccgagtaaaaagttatagtcgtttgaatttgctcagagcttcaacattcaatttcgagcatctcgctatattacgggactcaatcagacatccgagtaaaaagtttgttgtttgaattggctgagagcctcaacattcaatttcgagcgtctcgatatattaagggactcaatcaaacatccgagnaaaaagaaatgggcgctggaagttgctcagagcatcgacactgaattgcgagcgtctcgatatattacgggactcaatcagacatccgagtaaatagttattgtcgccggaatatgctcagaggttcaacattcaatttcgag

SEQ ID NO: 16184 - DNA, 423 bp, Glycine max
  unsure at all n locations
ttgaatgcactattcaatggagttgacatgaacattttcagactgatcaacacttgcacagtggccaaagatgcatgggagatcctgaaaatcactcatgaaggaacctccaaagtgaagatttccagattgcaactcttggctacaaaattcgaaaatctgaagatgaaggaggaagagtgtattcatgacttccacatgaacattcttgaaattgccaatgcctgcactgccttgggagagaggataacagatgaaaagctggtgagaaagatcctcagatccttgcctaagagatttgacatgaaagtcactgcaatagaggaggcccaagacatttgcaacatgagagtagatgaactcattggttctcttcanacctttgagctaggactctcggatagggctganaagaagagcaag

SEQ ID NO: 16185 - DNA, 397 bp, Glycine max
tggtcatagcaaaccactttgcatgccaaacatgtgttctcagcctcttggttacatccctagaagtgcaaaaaccattctctaggtttttctttagttcatatctccgatgaacacatcgaggaagcttcttttggtgattctcctccaaacctgatttggcaagggctttatcaattattcccagtttctgcctctttcttctgcacccttttcttgcaatttggttatcaaacacaattgtccttcttctcttgttcttttgagacctataatcattgcttactctattttctatgatagattgaagactatggagttcgagagcacgggattcagcatatttctgcaaattgattttccaaggtggtggtggtggtgtatgtactgaaacttg

SEQ ID NO: 16186 - DNA, 378 bp, Glycine max
  unsure at all n locations
ttgcttggttacctccttcttgactacatcaagaattaccgggttgagtcttctctgtggctgtcttactggtttagccccatcctctaaatttatttgatgcatacatgtggatgggctaataccaggaatgtccgccagggtccagcctataaccttcttatgcttcttgagaactgataacagcttctcctcttgctcattagcaagggaggaagatataattactggaaaactattgctatcatccaagtaagcatattttaaatttgatggtagaggctncaattctggtgtgggcgattagataatggtagaaagagatggtttctcagcctgtacctcatacagaaagtcagaggtatgtgtacttcctga

SEQ ID NO: 16187 - DNA, 326 bp, Glycine max
  unsure at all n locations
atgctntgatgcaaattcaaatgacaataacttttgagtcggatgttcgattgtgtctcgtaggatatcgagacgatcaaacgacaataacttttaattcgaatgtctgattgagccctttaatatatcgagacgctcgaaattgaaaacagaagctctatgaaaagtcaaatggacaaaactttcaattcggatatctgattgagtcccgtaatatatcgagacgctcgtaattgaaaactgaagctttgaggaaattcaaacgacaataacttttgaatctgatgtgcgattgtgtcccatacgatatcgagatgctcgttatt

SEQ ID NO: 16188 - DNA, 419 bp, Glycine max
tcaacatcagaccacttccagggtgctggaactacttcacatggacttgatggggcctatgcaagttgaaagccttggaggaaagaggtatgcctatgttgttgtggatgatttctccagatttacctgggtcaactttatcagagagaaatcagaaacctttgaagtattcaaagagttgagtctaagacttcaaagagaaaaggattgtgtcatcaagagaatcaggagtgaccatggcagagaatttgaaaacagcaggttcactgaattctgcacatctgaaggcatcactcatgagttctctgcagccattacaccacaacagaatggcatagttgaaaggaaaaacaggactctgcaagaggctgctagggtcatgcttcatgccaaagaacttccctataatctctgggctg

SEQ ID NO: 16189 - DNA, 422 bp, Glycine max
tgtattcatagaacatttgatattagtattttgttattaaaaaatatttttggcccctaattatttccgataaaactatcaattctgcaacaaaatggctcatgtttgtaatgcaagaaaagtgatggataagatagaagaaaccgtgaatatttttggcattggaatagacattccacccatttcatctagataaagacaacgtggtctatcataactagttcccgtcaagaaaaaaagcacagcgccaaaaacgccaataaatccatgacatgggattctatttcacaacccagcttggtagagggtgtttcttcctccaccctataaaaataaaagagcgtcccttgtatattcccaaaaaaactaatgtaaaatgtaatttacatctaggattactctttacgaaatataataggatg

SEQ ID NO: 16190 - DNA, 412 bp, Glycine max
tggaggcattacctttatggatctaaattttagttgtttagtgatgataagagccttagatatttgtttgatcaaaaagagcttaacatgaggcagaggagatggttagagttccttaaggattacgattttgagcttagctatcacccaggtaaagccaatgtagtagttgatgccttaagtagaaaatcccttcaaatgtctgctttgatggttagagagttggatctcttacagcagtttagagacatgagtttggcatgtgagattacctctagtagcattaacttgggtatgttgagagtcaccagcgaactcttgagcgagatccgtgagggtcagaagtctgacccattcttgtcagctcagttagagtccatagttgcagggagaaagagtagtcttagagtgg

SEQ ID NO: 16191 - DNA, 418 bp, Glycine max
tctcgatatattatgcacctgaatcagacttccgtttgaaaagttatgaccatttgaatttcttgagagcttccgttgggcaattttgagcgtctcgatatattatgcgcctgaattgaacttccgtgtgattagttatgaccatttgaatttctcaacagctttcgttgttcaatttcgagcgtctcggtatattatgcgtcagaatcggacttccgtgtgacaagttatgaccatttgaatttctcgagagcttccgttgttcaatttcaagcttctcgatatattatgcaccttaatcagacttccgtgtgaaaagttatgaccatttgaatttctccagagcttccgctgtttaatttcaagcttctcgatatattatgcacctgaatcagacttccgtgtgataagttatgac

SEQ ID NO: 16192 - DNA, 440 bp, Glycine max
  unsure at all n locations
tatagacaactcaagcttgctttgaaaacttccattcaccctaggccttacatagctacaatggtttagtgagaatggagagctaattgtagatagacaagttttgatatgcttctccattggaaaatatgttgatgagatactatttgatgtagtccctatggaggctagccatctcttacttggaaggctttggcagtatgatagggatgctgtccacaatggtgtcacaaacaaattttcatttgtacataaagggcaaaaggttacccttaaacctttgtctccaagtgaggtttgtgaggatcaaataanaatgagagtgaaaagagaacaagagagaaaagaagagaaaaataaaattgatgaaaagagagagaaacaagaaaggagagataagaaagaaaatagtggaggtaaaaaaaggagtgaaactgaaa

SEQ ID NO: 16193 - DNA, 418 bp, Glycine max
  unsure at all n locations
tagactctgtttcatgaagaagaggatcatctatttgagggaagagtcgcaagtttgagaataggatttaagaaactctcacgtgaaagagaggagaaatataaagaaaatacgcgaatgttctgaaagattcttctatcaagaagagaatttcaatttctcactttctagaaggaaattgaaattccacatttttagttgtttaaaattatgttttaaaattccaaaatttaaattcttcataacacaccatccccacaatggaatttagattatagaaagtgaaattctctgatcaataactgtccacaattaaaattctttatccaaaggtactctaaggcttactttacaccttcctatgtatgttgaactcactaggcttgtttaccacactnttagaagttcaatattcact

SEQ ID NO: 16194 - DNA, 418 bp, Glycine max
  unsure at all n locations
agcaatgncccttgatatattngagggactcatgttcactatgattgacaaattccttgggataaaggtagtgttgccatgttttcaaagcccgtactaaggcatacaactccttatcataagttgaatagttaagggtaggaccacttaacttttcactaaaataagcaattggatggccttcttgcatcaacacagccccaatcccaacatttgaagcatcacactcaatttcaaaagatttttgaaagttnggcaacgcaagtatggaggcattagatagcttttgnnnaagaacattgaaagcttcttcttgtttctctccccatttgaaaccagcatttttcttgagcacttcattgagaggtgctaccaatgtgctaaaatccttcacaaatcgtctataaaaacttgctaa

SEQ ID NO: 16195 - DNA, 416 bp, Glycine max
  unsure at all n locations
ntatgcttaagtacgtatggcaaaacttcattactgttgttcaagacatacaagcgagcttgtaacaaatgttctacacttggagtgatcacatgcagtcctcttaaacccttaccacccactctgtcatcatgccgagactcaggaaggccaataggtttagccttctctaagtattctgaacaaaattcaatggcttcttctgcaatgtacctctcaacaatagatgcttctggacgatatagattctttttatacccttttaagattttcatgtatcgttcaaccaggtacatccaccatagataaacaggaccacaacatttgatttctctgaccagatgcacaatcaagtgaatcatgatgtcaaagaaagcagggggaaaatacatctccgactggcacagtataattgc

SEQ ID NO: 16196 - DNA, 384 bp, Glycine max
  unsure at all n locations
atctttgagccaattcaaacgacaataactttttactcggatgtctgattgagtcccgtgatataacgagacgctcgaaattgaatgttgaagctctgagcgaattcaaacgacaataactttttactcggatgtctgattgaggcccgtaatatatcgagacgctcgaaattgaatgttgaagctctgagccaattcaaacgacaataactttttactcggatgtctgattgactctcgtcacatatcgagacgctcgaaattgaatgttgaagctctgagcgaattcaaacgacaataactttntactcggatgtctgattgaggcccgtaatatatcgagacgctcgaaattgaatgttgaagctctgagccaattcaaac

SEQ ID NO: 16197 - DNA, 385 bp, Glycine max
taaacattcaacttcgagcgtctcgatatattactgtagtctcaatcaaacatccgagaaaaaagttattgtcgtttgaattggctcagagcttcaacattcaatttcgagcgtctcgatatatgacaggactcaatcagacatccgagtaaaaagttattgtcgtttgaattagctcagagcttcaacattcaatttcgagcgtctcgatatatcacgggactatatcatacatccgagtaaaaagttattgtcgtttgaattggctcagagcttaaacattcaactgcgagcgtctcgatatatgacgagtctcaatcagacatccgagaaaaaagttattgtcgtatgaattggctcagaggttccacattcaatttcgagc

SEQ ID NO: 16198 - DNA, 379 bp, Glycine max
tttcatgcattctataactcggatgtccgattcaggcgcataatatatcgagacacttgatattgaataacagaagctctcgagaaattcgaatggtcataacttttcacacggatgtccgattcgggcgcataatatgtcgagacgctcgaaattgaacaacggaagctctcgagaaattctaatggtcataacttttcactcggaggaccgattcaggcgcataatatatcgagacgctcgaaattgaacaacggaagctcccgagatattcaaatggtcataacttttaactcagaggtccgattcaggcgcataatatatcgagacgctcgaaattgatcatcgaaagctctctagaaattcatatgcgcataac

SEQ ID NO: 16199 - DNA, 352 bp, Glycine max
gcttgtgcaaatgcaaacggtattatctttttactttgatgttcgatcgagtcacgttatacatcgaaacgctcgcaattgaaaacagaagctctgtgcaaattcaaacgacaatacattttaactcggatgtccgattgagtcccgtaatatatcaagacactcgaaattgagaataaaagctctgaacaaattccaacgacaataactttttactcggatgtccgattgagtccagtaatatatctagacactcgaaattgagaatagaacagctgagcaaatttaaacgacaatgacctttttactcggatgtccgatggagccccgagcgtctcgatatattatgcgc

SEQ ID NO: 16200 - DNA, 398 bp, Glycine max
aggctgctgtctttttgacacgctgggttctacaggcgattcatcaaagatttctcataagtcgccaaaccactcaacaatctgttgaacaaggatgttgcattttgtgtttaatgaagaatgtgtggaagcatttaatgatctcaagatcaaactagtagctgttccagtgcttatagcatttaatgatctcatgatagtgaggcttgttttgaagaagacacgttggagcatgagatggaattaacagcctcagccatggtattacagtctcctttggaagaagaatccaacaatgtgatagaatgcctagtcagtgaaaatgaaggagaagagctagcttgtattgaagagctggatggtccagaagataagtctgctggtcatgtgatgtttga

SEQ ID NO: 16201 - DNA, 388 bp, Glycine max
ttcttctgcttattagtgcacagctccttcaagaatttagcatatcttggaatttgctttattgcatccagcagaggtatgtttacctctacttttctaaatgtttccaatatctccttatttgcctcttccatttttttgatggaaattgctcttggagggaatggaacagggatatgctgcttctgtaaatcagaattaccagtggaagattcacctgcatagaaattgttaggtaacttactctttacatgtttgtcatcagctttttctggagtagagtaaagttgggcaggttcatttgcggatgaagaagatgttgctggttgaggtccttgacacaactctcctgatctcaatgtaatggcactcacatttttaggattct

SEQ ID NO: 16202 - DNA, 418 bp, Glycine max
ttgagaaaggtgatgtgaacaagcggttactggttatatccttcaagaagaccccaattctgagttcatttctttgctttggttgctttccattgtcgaagctcttcaaagcgcgtttgaggattccccaattgaaggtagaccacacaactgaacgtgtgttcaagaacctcgttgcttttgagcagtttcactatccagacaagccttacttttgcaactatgtttctttcattgactctctgatacacactcagcttgatgtggagttgctggttgagaaggaagtgattgggcatgaacttgggagtgataaggaagtggcaactcttgttaatgggttatgcaaacatgttgtcacaaactcaacttggtaccatcacattataaataagctcaacgaccattacatgaacga

SEQ ID NO: 16203 - DNA, 393 bp, Glycine max
  unsure at all n locations
ggtttgcattcttcaacatcttttttggtgtgatggtgaaagtcgggtaaactttgttattcggtgatgtattggcatttgatgccacttataagaagaataagtatcatctacctgttgtgggtttttctggtgttaatcacaacaatcaaaccatagtttatgacacaatccttgtaacaaatgcaaccgaagagacgtatgtttggttattagaacaatttgtgcaagccatgaatagtaagaaactatcaacaacgattactgatggtgatattgcaatgagaaatgcataagaaagatacttttcaaaacatgcctangttatgtgcttggcacttgatacgtaatgcanaagccaatgtaaacaatcctgcattnttgccaatgttt

SEQ ID NO: 16204 - DNA, 381 bp, Glycine max
  unsure at all n locations
ttcttatccaaacatatcctttattaaagttatttcttcttattctcgtaggaccatgaatggaggcaagctataactgctgctggatctggatgcgttgcagctttatcacgtgagagatatcttgtgagcaatgatcttcttatagagttccatcaggtatttgacttcaaagaactcctattttgttttcgcttatcgttcttttggtatataacactgtagattgagtgtacacatcacattaccaatttactgtatctttattatatgtcttaattcttgtacatttccacagaagcagatgcaactttagcaagattngcttgtaaaacttatatctataaatttataaaacttaataaatttagtgcatctaat

SEQ ID NO: 16205 - DNA, 405 bp, Glycine max
tcaacattcaatttcgagcgtcttcatatattatgggactcaatcagacatccgagtaaaaagttattgtcgtttgaatttgctcaaagcttcaacattcaaattcgagcgtctcgttatattataggactcagtcagacatccgagtaaaaagttattgacgtttgaatttgctcagagcttcaacattcaatttcgagcgtgtcgctatattacgggactatatcagacatccgagtaaaaagttattgtcggttgaatttgctcagagcttcaacattcaatttcgagcgtctccatatattacgggactcaatcacacatccgagtaaaaagttattggcgttagaattggctcaaagcttcaacattcaaattcgagccgctcgctatattatacgactc

SEQ ID NO: 16206 - DNA, 369 bp, Glycine max
  unsure at all n locations
tttctttgtttatatggaagccctgcaacaaactctagctctgaaaaattggaaataatattgtaggaaacatcaagtccttcaagtgacttcaaattctcaatcccatgcaaagtagttagagcattgctcctcaaaactagtttaacaatatgacaggaaacctgcaaggtccaacacaattgtatatgggtctccagagcaaatccctaaatgaaaggcatacaactaaaacaaaagatattaacttttctacaaataaattgctntcattgcatttaaggatcctgtcattcaactttcaatcctgaaatatcaattcattctccatgaatcgcagaagtcagcacagcaagcaaataaagacat

SEQ ID NO: 16207 - DNA, 400 bp, Glycine max
tgtagggttaaagtctcacggttgtcacgttctcgtgcaacaattgttagctgtggctatacgagacatcttgccaaacaaagtcaggttagcgatagctcgcctatgctttttcttccatgctatatgtagcaaagtcattgatccagtcaagtttgatgagttggaaaataaggccgcaattatactatgccagttggagatgtattttccccctgcttttttgacatcatgattcacttgattgtgcatctggtcagagaaatcaaatgatgtggtcctgtttatctacggtggatgtacccggttgagcgatacatgaagatcttaaaagggtatacaaagaatctatattgtccagaagcatctattgttgagaggtacattgcaaaagaagcca

SEQ ID NO: 16208 - DNA, 372 bp, Glycine max
ttcttatgttgctagcatatagcatatcatcaacatataacaccaagaatgagtatttactcccactaaacttgtggtatacacaatcatcaactgcatttgcctcaaaatcatatgaggtaatgacttgatgaaacttgtaataccattgatgggaagcttgtttcaaacaatagatgaatttatttagtttgcaaaccatagactttgagtcacctgatacaaagttttttggttgcatcatataaattgtgtcttcaatgtcaccatttagaaacgtagtcttaactacaatctaaaagttcctatagcctccatcgcaacctttttgccatcgccaacaaatatgaatctttcatcatcacttgacag

SEQ ID NO: 16209 - DNA, 405 bp, Glycine max
  unsure at all n locations
nttaaagcagcttttagatactgcttccctcatcagacctgtcaagccttcagccactagatcaaaaagaaggggtgccaaagggtccccttgtctcaaccctctttgaggtttgaattcagaagttgggctaccattaacaagaatagatatggaagctaaggtgagacaagcccttatccacctaatccatctctcatggaaccccattctcctcaacatatagaggagaaaatgccaagatacagaattataagccttctcaaagtccactttaaaaaccatgcaagacttcttggatcttcgagcctcctcaatcacctcattagccaccaaaactccatggagcaattgtctgccttttataaaagttgtctgcctttcatctataagataaggcatgac

SEQ ID NO: 16210 - DNA, 421 bp, Glycine max
  unsure at all n locations
tatgctgcaaacatctacaacagacctcctcaacctcagcagcaaaatcagccacaacagaataattatgacctctccagcaacaggtacaatcccgggtggaggaatcatcccaaccttagatggctgaatccttcacaatagcagcaactttgaaagccaatagttgcttagtgttaaaaaaaatatagagtgcaacaattatttaataacactcggcgagtgcataaacaataaagctgaagtatagagtaactttgctttgcaaagaaaaaataatgaaaaattaaatgtatagtccaacaatttctgcaaagtttcacgttagagattntctcatttctttatgattnttttcatgtgttactttgagatagagattgccttttataaaattcagtaaatgattcattgtgggatt

SEQ ID NO: 16211 - DNA, 384 bp, Glycine max
ttctttgatgcaacatttggagaggttaatgaaacaacgagatgatgcgctccatgagaggttggatcaaatggagaatagagatcataatgaagaagaaaggaggagaagagggaatgatggtgttcctagacaaaaccgaattgatggtattaaactcaacattcctccatttaaaggaaagaatgatccggaggcctacttggagtgggagatgaaaatagagcatttttctcatgcaacaactatgaggaggaccaaaaggtgaagcgtgccgccatggagttttccgactatgctcttgtgtggtggaacaagctacaaaaggagagagcaagaaatgaagagctggttgatacatggacggagatgataaagatcatg

SEQ ID NO: 16212 - DNA, 385 bp, Glycine max
tcaacattcaatatcgagcgtttcgataaattactgggacacaatagaacatacgagtaaaaacttattgtcgtttgaatttgctcagagctttggtattcaatttcgagcgtctggatatattacgtgtctcaatcagacatccgagtaaaaagttattgttgtttgaagttgctcaaagcttcaacattcaatatcgagcgtctcaatatattacgggactcaatcagacattagagtaaaaatttattatcgtttgaacttgcttagagcttcgataatcaatttcgagcgtctcgatatattaccggactcagtcagtctaccgagtaaaaagttattgccgtttgaatttgctcagagcttcggtattcaatatcgagcg

SEQ ID NO: 16213 - DNA, 377 bp, Glycine max
ttcttgtcctacaattgctagttttttcattgacagttgcccaatgggtatcatctgcattgatagcaaatctcacatccttggccaaacgaagatacatataccaatttaatataaatggagaataaattaccgttctactctgatctacaaatgctgctgattccctcacttggccattagtgatgcctggcatatatttgcgctgtttctgtactggcacagactctggagataaaggttccttgatgtcttccgcatagtgtttcaatgaatttggagagtttccctgttgacagagagcgatgataaattaacagctgacaatgaaagctatatagatccgatcaaaaagttagtctcatagataaaatcaa

SEQ ID NO: 16214 - DNA, 405 bp, Glycine max
tctttgttcctatggttcagtaaggccaacaatgttcagcgcccagggggccgccgaggaacaggtcctgtgcaacaaccccaacagccaatgccaatgatgcagcagcaggtctgctcttgcacagagtttccaatttttttgtttgtctctcacgttactcatctgcatgcatgcctgatggtgagatactttcttatttgtttgttagatgcttccaagggggcgtgtctatcgttaccctcctggccgcaacatgcaagatgtcccacttcaaggtgtagctggtggaatgatgtcagtcccttatgacatgggtggtctgccaatccgcgatgctgtgggacagccaatgcccattcaagctttggccacggctcttgcaaatgctccccctgaacagca

SEQ ID NO: 16215 - DNA, 388 bp, Glycine max
  unsure at all n locations
agctttgtgctaatatgttctattgacactctttatttctgaacttcttctttcacggcaaagtacttcaattccatatgcttagcacccgtagagtacttgtcgttcttagaaaagaatattgctgcggagttatcacaatacattttcagcggcctagcaatactgtcgacaattccaagccctgaaataaagttctgcaaccaattagcctaaattgtagcctcaaaacatgctacaaattcagcttccatggtggatgcagcaacaactgattgttttgcactcttccatgatatttctcctccggctaagagaaatacaaagccaagagtggattntcttgtatccacacatccagcaaagtctgagtctgaatatccaatca

SEQ ID NO: 16216 - DNA, 414 bp, Glycine max
tgtagggttaaagtctcacgattgtcacgtgctcatgcaacaattgttagtcgtggctatacgagacatcttgccaaacaaagtcaggttaacgataactcgcctgtgctttttcttccatgctatatgtagcaaagtcattgatccagtaatgtttgatgagttggaaaatgaggccgcaattatactgtgccaattggagatgtattttccccctgctttctttgacatcatgattcacttgattgtgcatctggtcagagaaatcaaatgttgtggtcctgtttatctacggtggatgtacccggttgagcgatacatgaagatcttaaaagggtatacaaagaatctatatcatccagaagcatctattgttgagaggtacattgcagaagaagccattgaatttttgtc

SEQ ID NO: 16217 - DNA, 408 bp, Glycine max
tcaagaaaaagatggcctcttcaaattccttatttccggaagggaattctatcaatagacctccaatctttaatggagagggttaccactactggaaaacccgaatgcaaatttttatcgaggcaatagatctaaatatctgggaagccatagaaatagggccttatatacccaccacagtagaaagagtttcaatagatggtagttcatcaagtgaaagcataaccatagaaaaacctagagatagatggtctgaagaggatagaaaacgagtacaatacaacttaaaagccaaaaacataataacatctgccctaggaatggatgaatatttcagggtttcaaattgtaagagtgctaaggaaatgtgggacactcttcgattagcacatgaaggaactacagatg

SEQ ID NO: 16218 - DNA, 354 bp, Glycine max
ttgtatgcatttacaataggagccagtggcatagtccatgtacttctctaactctttcttgtacaaaacacaagcatggcctattgtgttgtaaaccttgtctgccccatataggttgatcttaccaaccctattctcctttggggttatgtactttctaatctcctcaatgatgaaaaaattgatcaaatgatcctccttcactggggagctcgtcccttcatcaaccttgggaacccgaatctgccttagagcaacattaccactatgaagagggctgactatttgatcctctagaaactccttgtccaacatggcgcctatgattgtctccattacttgaacttttgactc

SEQ ID NO: 16219 - DNA, 367 bp, Glycine max
  unsure at all n locations
agcttctcactgtcaaaggaacccctttgcattttttcacaatttcctttccgatctccattagatttggatattccttctcttgaccttccttaaatgcccatctcacaaacagcgatatacaattctctggagaaaggccctctaaaacataagagggaatagtgcccatcattgaagcaatggagttacttcgcgttgtcactatgattntgcttcccactgcaccaacttttattaaatttttcaagtcaatccattttgtataatcatcattccatatatcatccaagaccagtaaaaatttctgaagagaaagcttgtgtctaagacgagtttgaagctgctcaatatctaagctggtgat

SEQ ID NO: 16220 - DNA, 374 bp, Glycine max
tgactgttacttgatgaatgtatgtcagctacatattctttttcagccttatattgcagaacattatcatactgatcaacaaattgcttcagagttgttagccggcttacatatccatcaaaaaatgcatgcatgctttcattgtgtggaataatagacattccagcccagaactcacctcttacaaaggaaggagcccagcgatgtctctcacagaacaactctttcaaccatttattgtccttgaggtcaaaatcctccacaatcttctttcatttctgctcaaattcacttattggatgtgtgtcatatacaacattctgcaaatgatctcttaaggactcgtaataacatttccatggattagttgggga

SEQ ID NO: 16221 - DNA, 404 bp, Glycine max
tataatatatcgagatgctcgaaattaatcatcggtagctcttgagaaaatcaattggtcataatttatcacacggatgtccgattcgggtgcataatatgtcgagacgctcgaaattgaacaacggaggctctcgagaaattcaaatggctataacctttcacacagatgttcgattcaggagcatcacatatagagacgtacgaacaacggatgcactcgagaaatacaaatggtcataacttttcacaccgagttcccattcacgctcatactatattgatacgtttgaaattaaacatcggaagctcaacgagaaattcaaatggtcataactcttcacacggatgtccgattatggagaatcacatatcaagatgctcaaaattgaccaacgaagctct

SEQ ID NO: 16222 - DNA, 369 bp, Glycine max
  unsure at all n locations
atcttgtgcattcaatatcctgatgagggtgttccatatgttctcaagactagactaatacatttgttgcccaagtttcatggtcttgcaggtgaagatcctcataagcatcttaaggagttccatattgtttgttccaccatgaagccccttgatgtccaggaagatcatatctttctaaaggcttttcctcattctctagagggagtgaaaaaagattggttgtactaccttgctcccagatccatctccaactgggatgaccttaagagagtgttcttggagaaattcttccttgcatctaagaccactgccatcaaaaaagacatttcangaaacttaatggagagagcttgtatgagtactggg

SEQ ID NO: 16223 - DNA, 351 bp, Glycine max
ttgaatggacaccacttcattttggtcttctttgtatacttcaccaaatgggttgaagtgggtgcgtacgccagtgtgactaggagtgtggtggttaggttaatcaagaaagagataatctgctggtatgggttacccaggaagattatcattgataatgccaccaatctgaataataaaatgatgaaagaaatgtgtgaggatttcatgatccaacatcacaattctactccttatgggcccaagatgaatagggtagttgaggctgctaacaagaacatcaagaaattagttagaagattaccgggtcatacaaggattgacacaagatgctcccttttgcactacatg

SEQ ID NO: 16224 - DNA, 327 bp, Glycine max
ttcttctcggtacatcacgggcctcaatcgtacacccatgtcaaaagttatggccctctgaattggaccatagcttccttgttaggtttcgagcgtctcgatatattgtgtctgaatcggacatccgagtgaaaagttatgacaattttaatttctcgagaacttccattattcaatgccgagcgtctctatatatcatgggcgccaatcatacactcatgtcaaaagtaatggccgtctgaatttctccagaacttccattattcaatctccagcgtctctgtatatattgctactgaatctgacattcgactgaaaagttatgac

SEQ ID NO: 16225 - DNA, 305 bp, Glycine max
aagagaaattcaacgccaagtcccaattttgaaaccatatatattgtcatataacataatcactttattagaagcgcataagacaacatactcacatggcccctgtatttgtgagctcataggaaatcaagcaagggctaccaagaatccttgttgctcaacataattgacgaaagtcggacaaggaaatgtggcattaaatggctcaaatcaaccccaatacaaaatttcattactctaagcacattgcaaacaaaagcaatccttaattacaatccagggcagatgttatttctataacaaaa

SEQ ID NO: 16226 - DNA, 346 bp, Glycine max
  unsure at all n locations
caatgcccggcatcagagatgcagtantcaccaccatctgtctgcccaagggtgaactcatcacatgcgtgccttgataaaatttctataactgtaaagccaatgagggtctctttcttgccagtaatagtcttcacaaactccttctcagggttcttagccaacacatcatattcaggagaccctttctcaagcataaatctcctgcaaataattggcctattcaggattaaacctccatatggatactgtccaaggtaacagcaacatgaagagttgaagcaatccatataagggtagcggatgcttcaaccaactcttcccaggtttgcatctgttgccacca

SEQ ID NO: 16227 - DNA, 391 bp, Glycine max
tcaagataaatggcctcagcaaattccttatttctataatgaaattctatcaatagacctccaatctttaatggagagggttaccactactggaaaacccgaatgcaaatttttattgaagcaatagacttaagtatttgggaagccacataaatagggccatatatacctaccatagtagaaagaattacaatagatggtagcacatcaagtgaaagcataacaatataaaaatctagacatagatggtctgaagaggatagaagatgagttcaatacaatctaaaagccaaatacataataacatctgccctgagaatggatgaatatttcacggtttccaattgcaacaatgctaaagagatgtgggacactctacaattaacacatg

SEQ ID NO: 16228 - DNA, 367 bp, Glycine max
  unsure at all n locations
ttcttgcacacaagattctccttgcctggcacctcnaaaccttcaggttgggtcatattgatgtcttcctctaaatccccatgcaagaatgcagttttaacatctaactactccaagtgaagattctctgcagctacaatactcagaataactctgatggtagtcatctttacaactggagagaagatttctgtgaaatcaattccttgtttctgctgaaaccttttcaccacaagtctctccttgtatcttcttctatcgtcggatttttcctttaacctatagactcacctattctgtaacgctgtctttccttctataaatttagttaaagaccacgtcttattcttttgaaggggtgtcatct

SEQ ID NO: 16229 - DNA, 388 bp, Glycine max
gtgcataccccaaggatccattaggattttacttgtgaaagagagccatgagggtgggctcatgggccactttgggatagacaagacccttgtcttactcaaagaaaagttttattggccccatatgaagaaagatgtccataagcattgcactaggtgtgtggcttgtttacaagccaagtctagggtgatgcctcatgggctatacacacccttacccatcccagctgcaccttgggtagacattagtatggactttgtccttgggcttcctagaacccaaagaggtgtagactctatctttgtggtggtggataggtttagcatgatggcacactttataccatgccacaagatggatgatgcgttccacatctcaaaactcttt

SEQ ID NO: 16230 - DNA, 358 bp, Glycine max
  unsure at all n locations
ctttcactcgcatgtccgattcaagcgcatagcgtatcgagacgctagaaatctaacaaaggaagctctcgagaaattcaaatggtcataacttttcactcgcatgtccgattcaggcgcataacatatcgagacgcttgaaattgaacaactgattttctcgagaaattcaaatggtcataacttttaactcgcatgtccgattcaagcgcataacatatcgagacgctcgaaattgaacaacggatgttctcgagaaattcaaatggtcataacttttcactctcatgtgcgattcaggcgaataacttatcgagacgctcganattgaacaacggaagctctcgagatattcaaa

SEQ ID NO: 16231 - DNA, 374 bp, Glycine max
tttttattgctgcttaaagcatgtgtgatatacaaaatctgaagatcctaatgagtggtgaatttgatatgaaagatctaggggctgcaaagaaaatcttaggaatggagatctatagggatagaactcagaaaaggctatttttgtctcaaaaggattacattcagaagatacttgtgaggtttggaatggctaactctaaacctatcagcactcccctttcagaaaaagagaagttgtctgttatgataaagattcaagctcaggctgatcaggattatatgtcaaaggtttcatactcaagtgttgttggcagtctcatgtatgccatggtctgcacaagacctgaccttgcttatgctgttagcatggtc

SEQ ID NO: 16232 - DNA, 377 bp, Glycine max
ttcttgtagggttaaagtctcacttattgtcacgtgctcatgcaacaattgttatccgtggctatacgagacatcttgccaaacaaagtcaagttcacgataactcgcctgtgctttttcttccatgctatatgtagcaaagtgattgatccagtaatgtttgatgagctggaaaatgaagccgcaattatattgtgtcagttggagatgtattctccccctgctttctttgacatcatgattcacttgattgtgcatctagtcagagaaatcaaatgttgtggtcctgtttatctacagtggatgtacccggttgagcgatacatgaagatcttaaaagggtatgcaaagaatctatatcatccgaaagcatctat

SEQ ID NO: 16233 - DNA, 371 bp, Glycine max
tgcatgtcttcaacatctgaccacttccagggtgctggaactacttcacatggatttgatggggcctatgcaagttgaaagccttggaggaaagaggtatgcctatgttgttgtggatgatttctccagatttacctgggtaaactttatcagagagaaatcagaaacctttgaagtattcaaagagttgagtctaagacttcaaagagagaaagactgtgtcatcaagagaatcacgagtgaccatggcagagaatttgaaaacagcaggttcactgaattctgcacatctgaaggcatcactcatgagttctctgcagccattacaccacaacagaatgggatagttgagaggaaaaacaggaccttgc

SEQ ID NO: 16234 - DNA, 360 bp, Glycine max
taaacattcaatttcgaggctctcgatatattacggtacttaatcaagcatccaagaaaaaatttattgtcgtttgaatttgctcagagattcaacattcaatttcgagcgtctcgatatattacgggactcaatcagacatccgagtaaaaagttattgtcgtttgaattggctccgagcttcaacattcaatttcgagcgtctcgatatgttacgagactcaatcagacatccgagtaaaaagctattgtcggttgaatttgctcagagattcaacattgaatttcgagggtctcgatatcttacgggactcaatcagacatccgagtgaataggtattggcgtttgaattggctcag

SEQ ID NO: 16235 - DNA, 393 bp, Glycine max
tatgctgcaaacatttacaatatatttcctcaaccttaacagcaaaaccaacctcagcaaaacaattatcacctctccagcaatagatacaaccttggatggaggaatcaccctaatctcagatggtctagccctcaacagcaacaacagtagcctgctccttccttccaaaatgctgctggcccaagcagaccatacattcctccaccaatccaacaacaacaacagccccaaaaacaaccaacagttgagacccctccacaaccttccctcgaagaacttgtgaggcaaatgactatgccgaacatgcagtttctgcaaaagaccagagcctccattcaaagcttaaccaatcagatgggacaattggctacccaattgaatcaacaacag

SEQ ID NO: 16236 - DNA, 406 bp, Glycine max
  unsure at all n locations
tcttagtttcagatgatgcagatgggttggtagctacctcatgcactcctctaatgactatggcatcatttctggcactaaactgctgggagttggaagccatcttctcaattaaatttctggcttcagcaggagtcattgtctccaaggctccaccactggcagcatctatcatacttctctccatattactgagtccttcataaaaatattggagaagaagctgttctgaaatctgatggtgggggcaactggcacatagtttcttaaatctctcccagtactcatacaggctctctccattgagttgcctaatacctgagatatccttcctgatggctgtggtccctgaagcagggaaaattnntttcaagaatactctcttaaggtcatcccagctcgtgat

SEQ ID NO: 16237 - DNA, 398 bp, Glycine max
tgaatcagacctcagtgtgaaaagttatgaccattttaattttacgagagcttacgttgttcaatttctagcatctcgacatattatgcgcccgaatcggacatccgtgtgaaatgttatgaccatttgaatttctcgagagctatcgatgtttaatttcgagcgtatcgatttattgtaagcctgaaccggacatccgagtgaaaatttatgaccatttgaatttcacgagagcttccgttgatcaatttcgagtgtcactatatgggatgcgccccagttagacattcgagttaaatgttatgaccatttgaatttctcaagagcttccgttgttcaattctgagcgtctcgttatgtgatttgctttgatcgtaaactccggtgaaaagttatga

SEQ ID NO: 16238 - DNA, 286 bp, Glycine max
caccatacagacctttggccttccaatgcacaacctggagcaattgaacagcccgaaacttatgctgcaaacatttacaatatacctcctcaacctcagcagcaaaatcaaccaccatagaacaattatgacctctccagcaacagatacaaccctggatggaagaatcaccctaatctcagatggtctaaccctcagcaacaacaacaacagcctggctcttccttacaaaaggtgttggcccaagcagaccatacattcctccaccaatccaacaacagcaata

SEQ ID NO: 16239 - DNA, 400 bp, Glycine max
tcatttctggtccataggaagacaaactatatcctgtagtttaaggacactttcaactttttacttgttatgttcataccacatttaactcataatatcattaacattcaacaggaatcactgagaactttgaagcattgttcctttcctaatgtatctctggaaggcctaatatctgaccaatggaaagatatgggatggcaaagacctaatccatcgaatgactttaagtacacaaatatgttcttatgagagctcacgtgacattttggtcacttttcctatgtgaaagaatttgcttattaaatgttatgaaaacagtgtcattttagtgctgctaacggttatggtagcgtatacaattcactaatttaatttatgggatataattaaaccaaat

SEQ ID NO: 16240 - DNA, 359 bp, Glycine max
agcttgtagggttaaagtctcacgattgtcacgtgctcatgcaacaattgttagccgtggctatacgagacatcttgccaaacaaagtcaggttcacgataactcgcctgtgctttttcttccatgctatatgtagcaaagtgattgatccagtaatgtttgatgagttggaaaatgaggccgcaattatattgtgtcagttggagatgtattttccccctgctttctttgacatcatgattcacttgattgtgcatctagtcagagaaatcaaatgttgtggtcctgtttatctacggtggatgtacccggttgagcgatacatgaagatcttaaaagggtatacaaagaatctatat

SEQ ID NO: 16241 - DNA, 375 bp, Glycine max
atcttgcagacctaacattatctatgtatgataagcaaaacacatctcaacacatgataataataactagcactatattattcttttaattatagctcaaattcaaatggttgtgattttgtatttgaagatactctccacaaaatatattaaatcgcatatataaataatggtgttgacaagaactactaatacgtcccatgaccccaccccttatctacttattccatattgacacatatgcataattaatattaagctataaacttataaaaaacaaatttttatgttggcaaaaaaatgtcaatattaacaattatctatcactagacaataaataaattcgactaacaaaatttaaatatttaaataaaa

SEQ ID NO: 16242 - DNA, 375 bp, Glycine max
ttcttgtaatctttcacacatatactgtaatcgattaccagagtagattttcagaaaatattctcaacagtcacatctttttatgtgattcttgaatggctatcaaaggcctatatatatgtgacttgagacacgaatttgctaagagtttttcagaacaaaaaaagtcttatcctcttataaagcaaaattgttttatcctcttacaaattccttggccaaattacttgtgattcaataaggaatttttgagtgctcaaattgatcaatctatctctttcaagagagatttcttcttttcttcttcttcattctgaaaagggattaagagaccgagggtctcttgttgtgaaagaattctaaagacaacggaag

SEQ ID NO: 16243 - DNA, 353 bp, Glycine max
ttttcatgcattcttgctagccaagatgtgctgtagccttcggattgagcttgaacttgggcctgaatcagtccctgaccctgagttctccttctccttctcctctttcaaggcacggattagccgatttggcagatacagataccgatcctgaaagcgggaacgattggcgacaattctccgcccaggtctccatacccaaatgtcacccttttccggccaattttccggcgcatatggaaatccctcgccggacattccctgtgccactggctgtaaattcaataatacattattctcctccatgctcatcttccatctccatctccatctcgaacgctacttatctagct

SEQ ID NO: 16244 - DNA, 375 bp, Glycine max
tgacccttacgagatagatgggacgatttttatattaacttggagaaaccttccatgaatctctggtaatatcctgctaggcccaaaaaactgctaaattcaaaaacagacttaagactctcgcactcgagaatgacttctatcttagaggagatacagctataccccttgagatatcacatgccctaggaagctaactttctctaaccaaagctcacactcggacaacttagcatagattattcattcgtatgggtatgcagcacaaacctaaagagctcttcatgttcctctttagccctggaatataccacaatatgttctatgaatactaccacaaaactaacgaggtaagggtgaaagactctatacatg

SEQ ID NO: 16245 - DNA, 361 bp, Glycine max
ttcttgcttatctcttcagggagctcaacacagtactgcatatgttccttcaacttggacctacagcaagcaataaaaacaaagtatataactatatattctctaaaacaacaaaaatcacaacaaatccagcatcatcaagttcacatatcacaaattcaatacccaaattctttgttcaggctgttcgcggccgcagtcgtggccttcccgccaccgtatttcgccacaaaatcatccttcgcacgctccagaaaagccacaggcacctgtctcccaatcgattcatccgcaacaacacaataagctaaaaaaaagtgagtcagacattcatttccaaaaacataacgctgaacttcaa

SEQ ID NO: 16246 - DNA, 373 bp, Glycine max
ttcttcattcttagaatgaagttagtagagatacatatatcgtgaataatcatctataaaggttatgaagtatttcggactatttgcatccatgtctggacaacatatgtctgtatgtatgatttctaataaattagaactcctctttgcaccctttttagacttgttagtttgcttacccttaatgcaatctacacaagtctcaaaatcagcgaaatccaaagtactaagtactccttcatttactaatcgcttgattctttcaatagagatatgtcctaatctccggtgccacaacatagaggattcttcattcacaatacatcgtttttaacccaacagaaacatgcatagaagtagcatcatttttgaa

SEQ ID NO: 16247 - DNA, 378 bp, Glycine max
ttttttatcatgttcacgacaaaggactaaagaagaaatctccgtcttatgaccactacaaatcaagtcctccttgcctaacacatgatcaagccttgagcacaacaggcacggaatttgcaatttgcagtaaccagcaaactttgctataacataagaaaaaacggcatcgataaacaggaaaaagatcagcaaccattcgagaaaagccgatgccaaggccgtggtaacacccggggagagcttacgccactcagaagatgaaattccagtggtagccatcatccaaccaactcaattagcttcgaaaggagaaaccgattgctgaaagttgaaacagatcaaactatgaccttcttcccaaaatgatatgaataa

SEQ ID NO: 16248 - DNA, 382 bp, Glycine max
agcttatcagattaacattttttttcaaaatgcaacaatgagaaaagaaagcacaaagaggaaattcacagaaccaaatgagattaacatcaattcacattttgtttctaaagaatataagagaaaacacccgattcactcaggcagaggaaaacctctcaaaggtgcataattctcatgcaggcaattgttccatcacaattccaatcactgatatgtcataaatcaatttttgcaagtcatttcccatcaaatcaaagataaattgcataatcatcatggatcattagggcttttaggatttggactagctttgaaagaaatattggtttttctggatattcaaaaataccttgagaataggaaagcaacataaaaacaa

SEQ ID NO: 16249 - DNA, 416 bp, Glycine max
  unsure at all n locations
gacctatgatactcagcttcaatgtccttcttgatcaaagcttcgaagcaaatgttttttatatcgacattnttttcataaagtctatatatttactttaactataaaatatatcacacatattaccaatgttttgttgaggaagctcattgattatgccaatggttcatcttaaccaggtctctgattttggattggctaagttgaccaatgatactaatacacatgtctctactcgtgtcatgggaacattcgggtaatttcgccaccccatggtttaatacctacgtagaaactataaagaaattgataaaaatgggaattaatagtttaaatttgcatgtctaaacaggtatcttgccccagaatactcatcaagtggaacattgacagagaaatctgacgttttctcattt

SEQ ID NO: 16250 - DNA, 268 bp, Glycine max
  unsure at all n locations
tttgcattagacattttgccctcacatagttctttcgacgggaagggttgcggagggagcctcaactactttgttagtttcatggggcctgttcgctgtttgttggatttggtggagcgaatgtantggtctactctgggccatgtagcattttggaaggaaggagtaagttgctgttgttgttgatggctagaccatctgagattatggtgattcctccatctgggattgtatctattgctggagaggtcataattgctatgctatg

SEQ ID NO: 16251 - DNA, 367 bp, Glycine max
  unsure at all n locations
ttcttgcaagatggaagcaaagaaatctatcaatggggggtagaataaccctcattaattcagtcttaacagccttacccatctatttgctgtccttcttcaagatacctaaacatgtggtgcaaaagattgtatctattcaaaggaatttcttatggggaagtcaccaagactccaacaagatcccttggggaggcgccatttgcacatgaatcactcttgaggcaaaaatcaaggatcaaatggctcanggaaggtgacagtaacacatgcttctttcataaatccataaattttagaagacattataatgcaattcaaggaatattcattgaaagtatatgggttcagcaaccaaaattggtta

SEQ ID NO: 16252 - DNA, 402 bp, Glycine max
  unsure at all n locations
tacataatatgtctgaagtttagtacatatgctttttctttaatttcangatcctaagatgttgagtttttaattaaaccatgtgtggcaggaaatgaatgttctgagagattggcatactatgggatgagtacaaacctggtgaactatcttcgggagcgtttcaaccagggaaatgcaaccgctgcaaataatgtcacaacctggccaggaacatgctacatcacaccattgattggagcctttctagctgattcatacttgggaagatactggacaatttccagtttctcaattgtctatgttattgtaagtttagagattttttttttcttgtttgttgagtccccatgttatgctaaaggcatttagtcttcactcttctgacctcagtttatattt

SEQ ID NO: 16253 - DNA, 356 bp, Glycine max
tgcttaataaggctatacgctggaccctggctgacattcctggtattagcccatccacatgtatgcatcagataaatttataggatggggctaaaccagcaagacaaccacagagaagactcaacccggtgattcttgatgaagtgaagaaggaggtaaccaagcttttgcaagctggaatcatttatcctatctccgacagccaatgggtgagtcccgtccaggtagtctcgaagaaaaccggcctcaccgtcataaaaaatgagaaggaggagctgattcctactcgggtgcagaacagttggagagtctgcatctactataggaggctaaaccaagttaccaaaaaggaccac

SEQ ID NO: 16254 - DNA, 376 bp, Glycine max
ttgatcaatgttctggattgtctaactagtgaaaatgagaaagatctaagggctttcttgtaagacttagatcgtgaagaaaccattcctgcagggggaaccaactttgaagaattgaaaagcgggagtcaatccgagaagaccaaggtggagttgaagatcctacccaaccacctgaagtatgtgttcttggaggagaacgagaccaagcccgtggtgatcagcaattagctaacagtagaggaagataacaggttggtagaggtcctcaagagacacagggaggcaattaggtggcacatatcagatctaaaaggaattagccttgtctactgtatgcacaagataatgatggaagaagactatagacctgtca

SEQ ID NO: 16255 - DNA, 377 bp, Glycine max
ttctttttcgtctttaagaagttcaaagctacagtggagaaaaaaagtggttgagaaatcaaagatatgaggactgaccaaggaggagaattcacttccaaagagttttgagagttctgtgaagagaatggaatcagatgtcccctgatggttccaagatccccccaatagaatggtgtgacggaaagaaaaaatagaataatccttgatatggctcaaagcatgctcaaaagcaagaaattgccaaaagaattttgggcagaagctgtggcatggccgtttatctattcaatcgatcaccgacaagaagtgtatggggaaagacaccacaagaagtatggagtgggagaaagtctggtatctctcacttgagggtc

SEQ ID NO: 16256 - DNA, 373 bp, Glycine max
atcttggcattttgatgctgccactgtctatggggagggcgttttcaacatcagatcaaaggtttacatgtcaccaaaactgtggtatctcagagtcaatgtaatagaagctcaagatgtgataccgggtgacagataccgcctaccggaggtttttgtgaaagctcaagtgagctgccaagtgctgacaaccaagatatgccccagcagaacaaccaccccattctggaacgaagatttgatctttgtagcctgtgagccatttgaggagcaattaacaatcactgtggaggatcgtgtgcacccttcaaaagatgaggtactggggaagataagcctaccaatgaccctctttgagaagcgattagaccat

SEQ ID NO: 16257 - DNA, 357 bp, Glycine max
ttcttcaacatcagaccacttccagggtgctggaactacttcacatggacttgatggggcctatgcaagttgaaagccttggaggaaagaggtatgcctatgttgttgtggatgatttctccagatttacctgggtcaactttatcagagagaaatcagacacctttgaagtattcaaggagttgagtctaagacttcaaagagaaaaagactgtgtcatcaagagaatcaggagtgaccatggcagagagtttgaaaacagcaggtttactgaattctgcacatctgaaggcatcactcatgagttctctgcagccattacaccacaacaaaatgacatagttgaaaggaaaaaca

SEQ ID NO: 16258 - DNA, 378 bp, Glycine max
agcttgaagattagactatacgaggtatcttccttgggtatagcaatatctctaagggctactgtgtctacaacttgcaaactaagaaactcgtcatcagtcgagatgttgaagttgatgagtacgcttcttggaattgggatgaagaaaaagtggagaagaacgttcttatacccgctcaactacctcaagaagaagctgaggaagaagacccaggtgaaccaccttcacctgcaccacaacaacaagatcaagaactatcatcaccagagtctactccaagatgagtaagatctttggtggacatatatgaaacctgtaacttagccatacttgaacctggaagctttgaagaagcgtcaaagcaggacatatggg

SEQ ID NO: 16259 - DNA, 354 bp, Glycine max
ttcttagacgaccttgtttgagtcgagaatactttattatttatttggacaagtttgaatatgatgtagaagaaaatgaatgtgagcctttttcccctttgaaagacttaaaaaaaaagttttaaaaatacttttaattaagatttgaattttttttccttattagtatatatgtgaggggtagagagtgtcacaagatattaggagcttccatgggttagcaagcttctataaaaggttcgttcctaatttctctacaattgcatcacctctcaatgagctggtgaagaaagatgtggcatttacctggggtgaaaaacaagagcaagcctttgctttgttcatagaaaagct

SEQ ID NO: 16260 - DNA, 368 bp, Glycine max
ttcttaagctccttcaactgcacaaggctcttaatatttgaagagtatccttgtggaaccttcacccgacgaagacactgacaaaaacttatctattccttcttggacaaagtatggcaggctgggggcaagtaaattttcttcccatcagaccttggatgcaactgtgatcgtatacccatatcagctagatcttgacgggtattcaagccatccttcgtcttgccttgaatgttaaggagcgtcccaatcacactgtcacaaacatttttctccacatggataacatcaatacaatgtctaacgtcaagatcacactagtatggaagatcaacgaaaatggacctcttcttccatatgcaactctg

SEQ ID NO: 16261 - DNA, 370 bp, Glycine max
  unsure at all n locations
acttaattaacaaaatctaatccggaaatatatcttatgnncttgtttgtttaaagaaagtgataaatcagcttcaaatcaaacaacctgcaattgagtgctctcgtccagtacgacaacgtcttggatatggatgttcactgcacccaagaattggtcttttgagatcaatgctgaaatcaggatctccaagatcattgtaaacatcataatcatagattctttcataactcttacgttctccttctccatttcctctcaatagcattagctccacttctctaagtcttctcaacccacatggtgtttgtgatggcaaataagactgtttcagaataagttaactcgatttaaaaaaaaaaagcctata

SEQ ID NO: 16262 - DNA, 429 bp, Glycine max
  unsure at all n locations
tgccacggtccgagcattgtgatgagtgggtaacatacccaggcgcaaccccttcgaaaacctatcgacgatgacaaagatacacgtgttgcccttgtaagagggtaatcccacgataaagtccatggataaataatcccatggttgtactggtatcggaagaggactcaacagcccatctggttttctgttatcgtatttggtacattggcacgttaagcatcctgctatgaaggcacgggtatcagctctaacggaatcccacgtaaagttttcttgtaagcgatgaagcgttttctgaatccccatgtgaccacctgtcggagattggtggaatgcttctagtaacaacttagtgaaggaggaatttgagggaatccanatacggcctctgtgtaagatcanataagcagttaacgtgtactctgg

SEQ ID NO: 16263 - DNA, 413 bp, Glycine max
  unsure at all n locations
gtctatgtggataaaagagcttaanaactgagatgttagaaaaggttggttatccattataaatgtcttaatcattttctcaaagatgataagtctcccatcccgaaagcttcttcactcccaaccttgatcagaaaatcaaacttattttcaaagtttgatttaaaattagggttttggcaacttggcttacaactagaagatcagtataaaactgaagatcagtattaaacagtcttttgtgttccgaatgctcagtaccaatggacagtccttccttttggtttaaaagtatcaccctttctcttccacaaagccatgactaagatttttagcctattttggacaacatcattgnttacatagatgatatccttttctgttcaaaagacattgtctctcataaaaactta

SEQ ID NO: 16264 - DNA, 302 bp, Glycine max
  unsure at all n locations
ctcagcttgaccattcccttgcctctttgttggtttgctattangtactcangcacatcacgtangtgcggaggtggtggattcttgctcaaaactttgtcatgcttcagtagatctgttcaaatacaatttcaatcctttaaatttaacttcaaacataagttttaaaaaaaataaaaaacaataaatgccaattgtatattttaacgataacatcaacctattacattacctaggtcttttggattagtttcgaagtgggctttcaacctaaaataaaagcacaagtttgcagaaatgaa

SEQ ID NO: 16265 - DNA, 418 bp, Glycine max
  unsure at all n locations
cttcaaactcagcttggtaacaatatcctttanataagaaaaatgtttataatatcttatcaatactaattaatgaacttaaaggcgaaatacggaagataaaaaattacaatgttcatattttttatgatttatgcatttaatattttttttcttttaatttcttaactaatatctaaaagcgctaattaacaagaaccataaaagtaaaccaatgagtaactaacaatcccgttataaaaaaaaaggttatcatcatgtcttttttggactaatcatatcatcctatgatttcatttgacaaataataaagttaaaaatgaatcgaaattaaaatacataggaccgaataggagttatgagttaatatatttaattaagacacatatctgttaacaanattgatacagcttgaatg

SEQ ID NO: 16266 - DNA, 385 bp, Glycine max
  unsure at all n locations
tcttagtctcaactgatgaagatgtaattcgggctactctatgcactcctctaatgacaatagcatcatttttggcactaaattgctaggagtttgaagccatcttctcaattaaatttctggcttcaataggggtcatgtctccaagggctccaccactggcagcatcaatcatacttctctccatgttactgagtccttcataaaaatattggagaagaagctgctcagaaatctggtggtgagggcaactgacacatagttntttaaatctctcccaatattcatataggctctctccactgagttgcctaatgcctgaaatatcctttctaatggtcgtggtcctagaagcagggaaatttttttctgagaatactctctt

SEQ ID NO: 16267 - DNA, 410 bp, Glycine max
  unsure at all n locations
tgtagcaattcttctaggcttggagtcataacatgcaatcctctagaacccttacctcccactctttcgttataccgagactcgggaaccccaataagttttgcctttntaatgtactccgaacaaaacttaatagctttttttgccacgtaccttttaacaatagatgcttcaggatagtgtaaattctttgcatacccttttatgatcttcatgtattgctcaaccgaatacttgcattggaaataaacaaaaccacaacatttaatttccctcaccagatgaacaattaatagaaccatgatgctgaaaaacaaaggaggaaaatacatctccaatggacataagataataacaacctcattttctacctcatctaacttgacaggatcaatgcacttgctacatat

SEQ ID NO: 16268 - DNA, 371 bp, Glycine max
ctaatgaattgggctctaattgcccatcagacatggcaagttaagccaaatttaatttactttacctcacggcatcaagcaatttgcttgcaattccttttcttctgttagagggagcaacccaaatggccctaatgccacaagcagcgatggttggtttgctatcacagaagattgcaccttccatcctttcaaaatcactcaaggaagcaacttttttttcaacctccctttggaaaataacattcccaaaccgaaaagtggtagaacgcgtcctcacttcccttttcttcacgctatcaggagagccagacacaactttgaatgccttttcaatgggttctgcaacgaggcactccacaaccctgtga

SEQ ID NO: 16269 - DNA, 398 bp, Glycine max
tgtttgtcgtcttcaacgttctctctacgggcttaaacaagccagccgacaatggtttaccaaactatcaagtttcttagtctcccatgggttccaacaatctaactcggaccactctcttttcttaaagctcactaagtcagccactactatactcttggtgtacgtcgatgatatcatactcacagggaacagtatgctggaaatacaagatatcaccaccctcttggattaaacattcaaaataaaagatcttggtgacttgaaggtctttttgtgactcgagattgcccgtaccaatcatggaatccatttatggcaacgaaaatatgccttagacattttgtctgattcagatatgctaggatgcaagccacactcgacacccatggattatt

SEQ ID NO: 16270 - DNA, 444 bp, Glycine max
actatcaatactcagcttaacattcaatttcgaggctctcgatatattactgtacttaatcaagcatccaagaaaaaatttattgtcgtttgaatttgctcagagattcaacattcaatttcgagcgtctcgatatattacgggactcaatcagacatccgagtaaaaagttattgtcgtttgaattggctccgagcttcaacattcaatttcgagcgtctcgatatgttacgagactcaatcagacatccgagtaaaaagctattgtcgtttgaatttgctcagagattcaacattgaatttcgagggtctcgatatcttacgggactcaatcagacatccgagtgaatagttattgtcgtttgaattggctcagagcttcaacattcaatttcgagggtctcgatatattacgggactcaatcagacatccgagtaaaaatt

SEQ ID NO: 16271 - DNA, 402 bp, Glycine max
gagagcttccgtgttcaatttcgagtgcctgtatattgatgcgcctgaatcggacatccgagtgaaaagttatgaccatttgaatttctcgagagcttcctatgtttaattttgagcgtctcgatatattatacgcctgaatcgaacctcagtgtaaaaagttatgaccatttgaatttctttagagcatccgttgttcattttcgagcgtctctatatgtgatgcaccttaatcggacctccgtgtgaaaagttatgaccatttgaatttctcgagagcttccgttgttcaatttcgagcgtctcgacatattatgcgcccgaatcggacatccatgggaaaagctatgactatttgaatttctcgagagcttccgtagttcaatttcgagcgtctggaca

SEQ ID NO: 16272 - DNA, 431 bp, Glycine max
  unsure at all n locations
nttgagcaattcanatggtcataacttttcactcgtaggtccgattcatgcgcataatatatcgagacgctcgaaattgaacaatggaagctcttgagcaattcaaatggtcataactttttactcagatgtcctattcaggcaaataatatatcgagacgctcaaaattgaacaacagaagctcttgagaaattcaaatggtcataacttttaactcggaggtctgattgaggcgcattatatatcaagacgctcgaaattgaacaatggaagctcttgagcaattcaaatggtcataacttttcactcggaggtcctattaaggcgcataatatatcgagatgctcgaaattgagcaatggaagctcttgagcaataacaatggtcataacttntatactcgaggttcgatngaggcgcataatgtatc

SEQ ID NO: 16273 - DNA, 434 bp, Glycine max
  unsure at all n locations
tgctggcctcaaacttgctaataatatgctgccacacttaccgacatttagagcttacccctaaaggaataccaaggtaagaaaaaggaaattccagttggctgcaattgagagaagaagctgcctccctacaccagcccacagatttacccaaacacccaaattggctcttattataggttatctttaaaccagaaaccaattcaaagcttttcaggatacactttaaaactttaacattatcattagtggcagtcccaaagaacaaggtgtcatcagcatattgaagtatattaacttcctcttttntctttcccacttggcagctattgaagagattcttttctactgctgatctcatcaacccagtaatgccttccaccactatattaaatagcaaaggtgcaaggtggtcaccttgccttaagcctctc

SEQ ID NO: 16274 - DNA, 441 bp, Glycine max
  unsure at all n locations
gtactctagcttaaagattggctaagattttgttaaaacataagcacttanacaatgaaggaaagctggagttgctgcacatgatgtccaacgttatgtcaaagaataagatcgggctgcacaatgcacaaagcaagataaagtgtcaaatgaagaattgaagctgcaggattcacgatgtcggatataatgtccaggacatcctgcctgaaaatactggaattgctaaaagcattgaagctgcaggatccacgatgtcggatacaatgtccaggacatcctgcccgaaaatactggagttgctaaaagcatttgaagttgcagatccacgatgtcggatacgatgtccaggacatcttgcccgaaaatactggacatataaatctgttatatctttaacagattattgtgcagttagcaagagattagatgatctatctt

SEQ ID NO: 16275 - DNA, 421 bp, Glycine max
  unsure at all n locations
tctgttctgaattcgagcatctcatatactactggaaacaatcggacatccgagtaaaaaggtttgttgtttgaattttctaagaggttatgatttcaattntgagcgtctcgatatattacgagactcaatcaggcatccgagtaaaaagttattgtcgttagatttttcttagagcttctatttccgattatgagcgtctcgatatattacgagattcattcggacatccgagtaaaaagttattgtcgtttgattttgctcanagcttctgttatgaatttcgagtgtctcgatatactacgggacacaatcggacatccgagtaaaaaggtattgacatttgaatttgctcatagcattcgttgtcaattacgagcgtctagatatattaaaggattcattcggacatccgagtaaa

SEQ ID NO: 16276 - DNA, 386 bp, Glycine max
  unsure at all n locations
ntaatactattcaatgttacaccatcatatagactatataacgattggtggcggttgtgtcggcaacgataaccgtgataatagcggtgacaataataataacgatggtggtggcgatgatggtattgatggtggtgataatggtggcaatggcgatagcggcgacaatgaaggcaacaacaatgacggtggtggtggcggcgacgatggtggcgacaatggtaggagtgacaacgccagtgatggtggtgtgatggctgtcatggtggagaagcgatgatggtggggaagatggtgatgatggtggtggcgatgatgacagtgatagtgatggggttggtgagggcaactatcctattctgttgctctctaaccaattcaccccc

SEQ ID NO: 16277 - DNA, 408 bp, Glycine max
  unsure at all n locations
ttctggtgggacatcttcacttgctttccaatctgacattcaccacagattctgccttcttctattttcaaattgagaatgcctctaacagcacctttgtcaatgattatcttcatgcctcttaagtgcagatgtccaaatctttgatgccatattctgacttcatcttctttggaggatagacatgtggaggagtaactggtttcttgaggtgtccataggtaacagttgtcctttgttctgctgcccttcattagaacttcactcttctcatttgtcaccaagcattctgactttgtgaagtttacattgaatccttcatcacacaactgactgatgctgatcaagtttgcagtcagtcccttcaccagcagtactntgtccagactaagaagtccatcatgggct

SEQ ID NO: 16278 - DNA, 407 bp, Glycine max
tcaagaaaaagatggcctcagcaaattccttatttccagaagggaattctatcaatagacctccaatctttaatggagagggttaccactactggaaaacccgaatgcaaatttttatcgaggcaatagatctaaatatctgggaagccataaaaatagggccttatatacccaccacagtagaaagagtttcaatagatggtagttcatcaagtgaaagcataaccatagaaaaacctagagataaatggtctgaagaggatagaaaacgagtacaatacaacttaaaagccaaaaacataataacatatgccctaggaatggatgaatatttcagggtttcaaattgtaagagtgctaaggaaatgtgggacactcttcgattaacacatgaaggaactacagat

SEQ ID NO: 16279 - DNA, 412 bp, Glycine max
tccatcacttttcacacagaggtcagattcgggctcataatatgtcgagatgctcggaattgaaccacggaagctctcgagtaattcaaatggtcataacttttcacacagatgtccgattcgggcgcataatatgtcgagtagctcgaaattgaacaacggaagctgtcgagaaattcaaatggtcataatttttcacacggaggtcagattcgggcacataatatgttgagatgctcggaattgaaccacgaaagctctcgagaaattcaaatggtcataacttttcacacggttgtccgattcacgcgtatgacatatacagacgctcgaaattgaacatcgaaagctcttgagaaaatcagatggtcataacttttcacacggatgttcgagtaaggtgcatcacata

SEQ ID NO: 16280 - DNA, 345 bp, Glycine max
agcttccattttcaatttggagcgtctcgatatattacgggtgtcaactggacatccgtgtataaagttattgtcgtttcaatttgctcagagcttcggttctaaattttgagcgtctctaaatattacgggactcaataagacatctgagtaaaaagttattgtatgttgaatttgctacgagcttccgttttcaacttggagcgtctcgatatataacgggactcaatcggacatccgcgtataaagttattgtcgattgaatttgctaccagcttcagtattcaatttggagagtctcgatatatttcgggactcaaccagacatccgagtaaaaagttatt

SEQ ID NO: 16281 - DNA, 395 bp, Glycine max
tgtagcaatatcaaacgaaaataactttatacacggatgtccgaatgagtctcgtaatatatcgatacgctccaaattgaaaacataagcccgtagacaattcaaaggacaataactttttactcggatgtccgatagagtctcgtaatataatgggacctccaaattgaaaatggaagctcctatcaaattcaaacgacaataactttttgctcggatgtacgattgagtcccgtactatattgagatgctcgaaattgacgacacaagctctgaacaattttgaacgacaataaatatattctcggatgttctattgagtcccgtaatatatcgtgctacttccaattgtaaatggaagctcgtaggaaattcatacgacaataactttatac

SEQ ID NO: 16282 - DNA, 429 bp, Glycine max
gacactatagacaactccacgcttaggattcaacattaattaccgtgcttctttcccacttgttgaattatatgcgactttatctagatgaaaacgatcgaattctactccctgcgggatattggattatatctgggccaccaatcccgtggaagaatcattggaaaggatgggaaacaacaccggaggatttgaatgatgagcagaccaaaattgagaatgtagccaaaagcctgtgctggaacaagctactggagaaggacgatatagccatttggcagaaagccaagaaccatttggattgcaaagccaaccgtaagctctctcacaatctgcctctctgcaaggcacacagtaaccctgacacggcctggtatgtgcttcatattccattgtcccttgtatttcattcacgaaatatttccatct

SEQ ID NO: 16283 - DNA, 404 bp, Glycine max
  unsure at all n locations
tctacagaaggtttgttcctaatttctctacaattgccttacctctcaatgagctggtgaagaagaatgtggcatttacttggggtgaaagacaagagcaagccttttttttctcaaagaaaagctcatcaaggcacttgttctagctcttcctcacttttctaaaacttttgagctagaatttgatgcctctggagtgggagttggagctatattgttacaaggcgggcaccctattgcttattttagtgaaaaacttcatggtgcccccctcagctaccccacctatgataaagagctntatgccttaataagagccctccaaacttgggaacattaccttgtttccaaggaatttgtcattcatagtgatcatgaatcacttaagtacattagatgacata

SEQ ID NO: 16284 - DNA, 384 bp, Glycine max
agcttatcaacatcaaacttggagaaagagttcttggggtcaagacatgagaagcaatcaagtataatgttacttccttcactaaagcggtgatccatctccacacatattttatcaatagcaacataaaaaatctctgcacggtaatgatgaagattagtgatagtcctcccttctgctcttgaacgaccccgaactggtatttcgtcatccatatttggtaccagaatacttttagcaacacacaaaatccttggacatcggcaaaaaaattattccagccactctctctcattgtgcccaaccgagctttgacaacatcaactaattctctttgcaatatatttgaaagctcgtttgtttcctatgacctggatcacgcac

SEQ ID NO: 16285 - DNA, 431 bp, Glycine max
  unsure at all n locations
acactatanacaactcatgcttaagccttgaattgagtgccattaccgtgttgatttttaagggagaccatatctgtagatgaggtgtttccaggtgaacttttctacctccctaactgaaatatcttgtaatggccttgcctcagtccacttagtgaaatagtcgatggtgaccaataagaacttgaccactcctatggcttttggcaatgggttcaatatgtccatgccccatatggcgataggccaagtggaactcaagctatggtggttgttgggaggggtgcgtggaacatctgtgaattcttacctcctctgtaagtagaaggtggcagccaataatatccgatacacaacactttggttgctagggaacgacctccgatatggaggccacatattctttcatgttagtatcgcatgacatagtc

SEQ ID NO: 16286 - DNA, 403 bp, Glycine max
tgaagacaaactggatgcgttggtcaacttggtaacccagctggccttgaatcagaaatctgtacctgtcgcaagggtttgtggtttgtgctcctctgctgaccaccatacagacctttgcccttccatgcagcaacctggagcaattgagcagcctgaagcttatgctgcaaatatttacaatagacctcctcaacctcagcagcaaaatcaaccacagtagagcaattatgacctttccagcaacagatacaaccctggatggaggaatcaccctaacctcagatggtccagccctcagcaacaacaacagcagcctgctccttccttccaaaatgctgctggcccaagcagaccatacattcctccaccaatccaacaacagcagcaacctcagaaacag

SEQ ID NO: 16287 - DNA, 382 bp, Glycine max
agcttcaactttcaatatcgagcgtttcgatatattacgggactgaatcagacatccgagtaaaaagttattgtcgttttaatttgcttagagcttcggtattgcatttcgagcgtctcgatatattacgggattcaatcagacatcagagtaaatagttattatcgttttaacttgcttagagcttcgataatcaatttcgagcgtctcgatatattacgggactcagtcagacaaccgagtaaaaagttattgtcgcttgaatttgctcagagcttcggtattcaatttcgagcgtctcgacatattacgggactcaattagacatccgagtaaaaagttattgtcgtttgagtgttctcagagcttcggtattcaattt

SEQ ID NO: 16288 - DNA, 369 bp, Glycine max
tgctttgagcaaattcaaacgacaataacttttgactcggatgtccgattgtgtcccgtagtatatcgagacgctcgtaattgaaaacggaagctctaagcaaattcaaacgacaataacttttgactcgggtgtccgattgtgtcctgtagtatatcgagacgctcgaaattgaaaactgaagctctgagaaaaatcaaacgacgataactttttactcggatgtccgattgaatcccgtaatatatcgagacgctcgtaattgaaaatagaagctctgagcaaattcaaacgacaataacttttgactcggatgtccgattgtgtcctgtaatatatcgagacactcgtaattggaacagaagctct

SEQ ID NO: 16289 - DNA, 414 bp, Glycine max
tctgttttcaatttcgagcgtctcgatattttacggtgctctatccgacatccgagttaaaagttattgtcgtttgatttttctaatagcttttcttttcaattacgagcgtctcgatatactacgggacacaatcggacacccgagttaaaagttattgtcgtttgaatttgctcaaagcttttgttgtcaattacgagcgtctcgatatattacgggactcaatcggacatccgagtaaaaatttattgtcgttggatttttctcagagcttcagttttcaattacgagcgtctcgatatactacgggacacaatcggacacccgagataaaagttattgttcgttgaatttgctcagagattctgttttcaattacgagcgtctttagatattacgggactcaatcggaca

SEQ ID NO: 16290 - DNA, 419 bp, Glycine max
tatcaatacatttgaagaggccatccaccacttcattatcactgtcaatgtttggattggtgtaaaagaactttggattcagataataacccgctgcatgcaaagggtggtgaagttggcaatcccatcttttatcaatgattgcaaggatatccttatacttcccttcattgttattgaaagctctttgaattgcttctttggccctatccattgcttcataaatgaaacccattgtaggttttttttcattatccaccaacctcaacacacttacaagaggccccatagcctttaaagcataaacaacatcattccaaaatgatggcataagaacaacatctgttgcttgcttccccttgggctctttagctgccttagacttcaaccattcatctgaattaaacatccttctaaga

SEQ ID NO: 16291 - DNA, 381 bp, Glycine max
tgcttatagttattggagggagaataaaacaatccaaaatcaattgtacccttcaagtaacaaagaattctttttgcggcttttagatgaggagaggtaggagcctccgtaaagcgacacacaactcccaccgcatatagaatatcaggccttgtattggttagatatcttaaactccccacaagactcttgaagaccgtggagtctaccttctctccttcatcaaactttgataacttcatgccaccttccatatgtgttttcacgggattacaatcaagcatattaaatttcttcaacacttcttttgtgtagcttccttgtgagacaaagataccattctacgtttgcttcacttccattcccaagtaatatgacatg

SEQ ID NO: 16292 - DNA, 388 bp, Glycine max
agcttgtttaccccatgttgaatttgcttacaatagagctgttcatagcaccaacaattgttctccttttgaagttgtttatggttttaacccactaactcctcttatcttttgcctatgcctaatgtttatgtttttaagcataaagaaggtcaagcaaaaggcggactatgtgaagaagcttcatgagagagtcaaagatcaaattgagagaaaaaataaaagctatgctaaacaagccaacaaagggagaaagaaggttgtcttcgaacccagagattgggtttgggtgcacatgagaaaagaaaggtttcgaaacaaaggaaatcaaagcttcaaccaaggggagatggaccatttcaagtgcttgaaagaatcaatgacaatg

SEQ ID NO: 16293 - DNA, 383 bp, Glycine max
agcatctcgtgccaatccttgtatgacacggtcatcttttggataatcttttttatattcttattggccgcttccacggctccattcatctttggccggtagggcgtggaattgtgatgctgggttttaaactcctcgcacatttccgccatcatcttattattccggttggtgccgttgtccgtgataatcttccttggcaaaccatatcgacagatgatctctttcttaatgaacctgaccaccacattcctcgtgacattggtatatgaagccgcctcgacccacttggtgaaataatctatcactacgaggatgaagcgatgaccattcgaggccttgggctcgatggccccgatgacatctattccccacatggagaa

SEQ ID NO: 16294 - DNA, 412 bp, Glycine max
  unsure at all n locations
ntgcacgtatcggtcaagtgtatggaccacgttgtatccaaggtgctcatcgataatggttccagtttaaacgtgatgcccaagagcactttggagaaattaccattcaatgcttcccacctaaagccaagttccatggtggttcgtgccttcgaaggcacccggcgagaggttaagggagagatcgacctccctgtacagatagaccctcacacctgtcaagttaccttccaaataatggatattaaccccccttacagctgcctgttggggcgcccgtggatccactcggtgggagttgttccctctacactccaccaaaagttgaaattcgtagtggaagggcatctggtcatcgtatcaggcgaggaagacatcttggtaagctgcccatcctctatgccttatgtgg

SEQ ID NO: 16295 - DNA, 384 bp, Glycine max
agctttaagtgtgattcctttctttttcttgtcattctcctcatgctgattcaatcttattagttccatttcatgttcctgtaactttccaaacaaagttgcaagagacatgtttgaaagatcccttgattctgtaatagccattacctttgattgtcattccctgcttaaacatctcaaaactttattaataagatccttattgggaaatatctttcctaatgatgcaagatgatttactatgtgtgtgaatctcttttgcatgtcctgtatagtttcattaggattcatcctatacaattcatattcatgagttaggtatttattctagacctttttacatttgtagttccttcatgggttacttgtaagttattccacata

SEQ ID NO: 16296 - DNA, 425 bp, Glycine max
tgcaccaacttctcatttcatccataagatactagttcatattttaatttaatgttcagtaacaagactaaacatcataataagaccaaagatatataaattttttatttgatacttatctgtatatactaaaaggaaaactgctgaaattagtaattattgattatttttgcaacatataggaaagaagacgttatgtgtgcttttttagtgatacgatgttatgtgtttaacagactaataatatagttttacgtattgaaacatcaaattataaatattttgtataaaaattaatggtatatagttgttggatgtatttattcagaaaaaaaggttattgggtgtatttctttttattggccctccctgtcttctaagtttaagtttgtccctgcaacatgtcattgaccaattctatgttt

SEQ ID NO: 16297 - DNA, 415 bp, Glycine max
gtgagaaatacttgctcgatatggccgacgtattactggtccctgtcacataccacgctctagggcatgccatgaaccttgccatagattctcatgactaactgagctacaccaccggcggagcgttgctgtggaagtgatcccagatgagaacctttcgcaagcggtcaaccaccaccaacataactgagtgaccgtgatacgaaggaagaccaacactactgtctagagagaaatcctgccatggttacgccgaaatcggaaggggagacaggaggcctggggcacgactgagaactgacttagttggctgactggtggcagagctcgtgaccaatagatggatgcctcgatgcatagatggccagacaaaattctctcgagtacgggctaacgtcgtcattactcccatatg

SEQ ID NO: 16298 - DNA, 409 bp, Glycine max
tgacaaaaggcctacctcatgtggtatgcgtccaatgaagttgtttaaaccgaagctaacgcgagataaggaagaaaggtttccaatccaagttgggattgttcctgtaagattgttaagacctgcagctagcactcttagatttgtgcagtggctgagattacttggaaaactgccaccaaagttgtttatgctgaagtttaggtattgaaggtatagtaaacgaccaacctcttgaggaaattcaccatggaagctattgtttaacaagttgactgtggtgaggaatgtgaggtttcctatgaagggtgtaagagtgcctcctagtctcagttgctcaaggctaaggtgtgtgactcttccattggagatgttgcatgtgattcctatccaatcgcagtgattgatg

SEQ ID NO: 16299 - DNA, 422 bp, Glycine max
tagaatacctgctgccaattcagttcccaagtctaattacaatttcatttccattaaatctgtattgtcttgtaataaagaagtcattgatatttggcatttccgtttgggtcatccttcatatgataggatgcaagtgttgaaacaaacttatcctatgttgacttgtgataaaacctttgtttgtgatacttgccataaagcaaaacagagaaaacttccatttcccaatagtgactcctatgcttctagtcctttctctttgatacatgtagatatttggggtccttgtaccacaactactttgaatggacataagtattttcttacaattatggatgatcatactacgattgtttggagttttataatgacttcaaaagctcagactcaaactcatttacaagcctttgtttcctatg

SEQ ID NO: 16300 - DNA, 257 bp, Glycine max
tgtagcaaatgcaaacggcgataacgttttatctctttgttcgattgagtcacgtaatacatcgaaacgctcgaaattgaaaacagaagctctgtgcaaattctgacgacaatacattttaactcggatgtccgattgagtcccgtaatatatcatgacactcgaaattgagaataaaagctctgaacaaattcaaacgacaataactttgtactcggatgtccgattgagtccaccaatatgtctagacactctta

SEQ ID NO: 16301 - DNA, 377 bp, Glycine max
tgcttggtatgaaaagttaagttcttttttaactgaaaatagttttatatgaaggaaagtagatactactttgtttcacaaagattatggaaccctaaaccctaatcatctagatatatatggatgatatcatattcggttgtactattgactctctgcgaaaggatttttccaagtttatgcaggccgagatcgaaatgagtgtgatgggagaattgaagtttttccttggacttcaaatcaaacaagcagacgaaggcatatgcatacatcatacaaagtacgtgaaggaactcttgaaaaaattttagatggacgatgcaatatatatgaaaactctcatacatccgaccactatacttagactagatgatgat

SEQ ID NO: 16302 - DNA, 415 bp, Glycine max
cttctggtgggacatcttgacttgctttccaatctgacattcaccacttattctgccttcttctattttcagattgggaatgcctctaacagcacctttgtcaatgattttcttcatgcctcttaagtgcagatgtccaaatctttgatgccatattttgacttcatcttctttggagaatagacatgtggaggagtaactggtttcttgaggggtccataggtaacagttgtcctttgatctgctgcccttcattaagacttcactcttctcatttgtcaccaagcattctgactttgtgaagcttacattgaatccttcatcacacaactgactgatgctgatcaagctcgcagacagtcccttcaccagcagtactttgttcagactaagaagtccctcatggactatcttt

SEQ ID NO: 16303 - DNA, 381 bp, Glycine max
agcttgtaatcgattaacgtaattgtgtaatcgattaccagacataaaaaattcaaatttcaagtctaaagagtcacaaatcttcagaaactaactgtgtaatcgattaccacttttatgtaattgattaccagtaaggaatttttgaaaataacttccaagagtcacaactgttcaagaaatttgttatgaccatctaaggcctataaataggtgatttgggatacaaaattttttagagtgtttctgaacaaaattgtcttatcctctcaaaaccaaattgtcttatcactctcaaaatattccttggccaaacacttgcaaattcaataaggaatcttgagggagcttcacattgtaatatccttctcttaaagagag

SEQ ID NO: 16304 - DNA, 422 bp, Glycine max
tgtcccaattgagccagtttattcctcttgttgatgcaccttttgatccccaccaaaataaattcagcatcatttaaatctcatcctctagtgtggttggaagcaagtggatactcatgcaatatgaagggatttcctaattagaagttccttattactagctttggaaagatactttctcgagtagtgattgatgcattccaaaatttgatcctttagacaactgaaaatttctttatttcatttgcctatgatagaagggaggcctaagtattttctagaccctatgattgtagaggcacccaaaagaaacatgattgtttgcgtcaaatattgttgagtgttggtgctgaaaaaattttatgacttgtctaaattaatcatttggtcaaaagcccttccataggtatctaggaattgag

SEQ ID NO: 16305 - DNA, 420 bp, Glycine max
tttgttttcaattacgagcgtcctgatatattacggtatcttttcggacatccgagtcaaaagtgattgtcgttagaatttgctcagagcttctgtcttcaattacgagcgtctccatgtattacgggactcaatcggacatccgagtaaaaagatattgtcgtttgattcttctcagagcttcaattttcaattacgagagtctcgatatactacgggacacaatcggacatccgagtcagaagttattgtcgtttgaattggctcagagcttctgttttcaattacgagcatctcgatttaatacgggacacaatcggacatccgagtcaaaagttattgtccgttggatttgctcagagcttctgttttcaattacgagcgtctcgatatattaccggactcaatcggacatccgag

SEQ ID NO: 16306 - DNA, 374 bp, Glycine max
agcttgcctgaaactatatgagatccctttgtcgttgccttccaacgagggtgaagcttaaggagaacccaatctcctatctggtagttcacttcacgacgtttcccatcagcttggcttttcatagcagcttgttccttagaagcttatttcgaatagcttggaaagtgttatccctatcagttaacatctcttcaacggcctcaatgttcgaagaccctgtaatatattcaggaaagttaaagggttttcggccaaaggtgacaccatacggattggctccagttcccgcattccatgaagtattatgggaccattcgacccacgggaggagcttcccccccatgcttggccgacgatggatgaaggctcgc

SEQ ID NO: 16307 - DNA, 422 bp, Glycine max
  unsure at all n locations
tctaaactntatacaagaacgaagctctgataccacttgttagacaagtggcctcagatatcttaattagggggggtcgaattaagatattgcaaactatttccccaattaaaaatctatttcaatttcaatgcaagttacaagttcccttaaaatgaactcttaaataatgattcaaatagaacaatctgaatataaatgtaaagcaataataaataaaagagtttaagggaagagaaagtgcaaactcatatttatactggttcgaccacacccttgtgcctacgtccagtccccaagcaacccgcttgagagtttcactatcttgtaaaatccctttacaagttctgagcacacaaggacaatccttcctttgtgttcatatttttttacaacaagagaccctcggtctctcaatccct

SEQ ID NO: 16308 - DNA, 362 bp, Glycine max
tgcttccattttcaattacaagcgactcgagatattacgggactcaatcggacattcgagtaaaaagtcattgttatttgaatatgttcacagctactgtattcaattttgagcgtcatgatatattttgggactcaatcggacatccgtgctaaaagttattgtcgattgcatttgctacgaggcttcgttttcaattacgagcgtctcgagatattacgaaactcaatccaacctccgagctaaaagttattgccgatggcatttgctacaagcttgcgttatcaattacgagcgcctctatatattacgggacttaatccgacctccgagataaaagttattgtcatttgaaattgcta

SEQ ID NO: 16309 - DNA, 406 bp, Glycine max
  unsure at all n locations
tccatcaggaagggtcgtccctgtgtggttcagactttgtaaaaggagttttacaaagagagtggaaaatttcaagtgggttgcttgaggactggacgtagacacgggaagtggccgaaccagtataaatcaagtttgcattccttctttccttaaacttcttttatttattgctatttatcttttgctttaaagaagtttattttgaattgtcttttgagtaattcatgttaagggtgcattgttaatccaaaaagagagagtgaaagtttaattggggaatagtctttgtattttaattcaaccccccaccccttcttaagataactgaggccatttgtccaacatcctattcttgataactcacttctctctaanaagacaaactttccggaatgataaaatg

SEQ ID NO: 16310 - DNA, 417 bp, Glycine max
ctataaggaacatgctggagaggaattgaagttggtgtgcttccagaagtgatgccacgccaactgaataggccactatgtgatttcatatctagttaaacacctcacataaggatctaagcatcagttcactacttcagtctgcccatctattagaggacaataagcagtgctaatcttcaagagggtacctggtctctggaacacttccttgcaccagagactcatgaaaagactgtcgatgccagatactactgatgcaagataaccatgcacactcaccacttctttaatgaataactcagctactccctcagttgtataagggtgactccatgccaaaaaatgagctcacttagtcagcctatccactaccactgatatagtagccttccctagagctactggtaagccttc

SEQ ID NO: 16311 - DNA, 424 bp, Glycine max
  unsure at all n locations
ntataaggagacattttggtagagatattgaagttggtattaatccagaattcagcccaggccaagtagttaggccactattttagtttagttctagttaaacacctcaaataaggttctaagcatcagttcactacttcagtctgcccatctatttgaggacaataggcagtgctcatcttcaattgggttcctggtctcttgaacaattccttccaaaagagactcatgaaaagtctgtctctgtcagatactattgatgcaggaaaaccatgcagtctcaccacttctttaatgaataactcagctacttccttagttgtataagggtgacttaatgccaaaaaatgagcttacttagtcagcctatccactaccactaatatagtgtccttcccttgagcttttggtaagcctccaatga

SEQ ID NO: 16312 - DNA, 383 bp, Glycine max
agcttgttccatttggtccattgctgagaagttatggtgatacaattgcaactgcaaaaacaatcggacaatattgggaagaagatctatcctgcatgagttggcttgatcaacaacctcatggttctgtcttgtatgttgcctttggtagtttcactcattttgaccaaaaccaattcaatgaactagctcttggacttgacctcaccaatagaccttttctttgggttgtgcatcaagacaataagagggtataccctaatgaattcttggcgtgtaaaggtaagattgtgagttgggctcctcaacaaaaggtgctaagccaccctgctatagcatgttttgtcacccattgtggttggggacatgctacgtgcacccag

SEQ ID NO: 16313 - DNA, 422 bp, Glycine max
  unsure at all n locations
ntgcagtagatgccactctactctaaatttttgaaagatatgttaacaaggaagcacaaatatattcatcaggaaaacatcatagtggaaggaaattgcagtgttgtgatccagaaaatccttccacccaagcataaagatcctgggagtgtaacaattccttgttcaattggagaagtcaatgtgggaaaagctcttattgacctaggagccaacatcaatttgatgccactctccatgtgttgaagattgggagagttggaaataatgcccactcgaatgactttacaattagctgaccgctccattaccaggccatatagagtaattgaagatgttttggtcagagtaaaatattttatcttcccagcagactttgtggtaatggatatctctgaagatactgacatccctgtaatatt

SEQ ID NO: 16314 - DNA, 377 bp, Glycine max
agctttgagcaaattcaaacgacaataacatattactcggatgtccgattgtgtcccgtagtatatcgagacactcaaaattcagaatagaaggtctgagtaaaatgaaacgacaataactttttactcggatgtccgattgagtctcgtaatatatcgagatgctcgaaattgaaaacgaaagctcgtagcaaatgcaaaccacaataacttttaacttggatgtccgattgtgtcccgtaatatatcgagatgctccaaattgaaaacagaagctctgaccaaaatctaacgacaataacattttactcggatgtccaaatgaatcccgtaatatatcgagatgctcgtaattgaaaacggaagctctgagcaaa

SEQ ID NO: 16315 - DNA, 403 bp, Glycine max
tattgtcgtttgaatatgcttagaccttatgttttttatttcgagcgccacgatatagtacgggacacaatcggacatccgagtaaaaaggtatagttttttgaatttcctcagagcatcagttttcaatttcgagtgtctccatatattacaggactcaatcagacatccgagttaaaagttattgtcgtttgaatatgctacgagcttctgttttcaattgcgagcgtctagatatactaagggacacaatcgtccatccgagaaaaaagtgaatgtcgtttgaatttgcacagagcttctgatttcaatttcgagcgtgtcaatatactacgggactcgatcggacatccgagttaagagttattatggtttgaattttctaggacctactattatcaat

SEQ ID NO: 16316 - DNA, 387 bp, Glycine max
agcttgagaccatatactaacacactttgacaatcatccgctactaccacattgtaaccttcgtcatcacttgggtcagaccgcatatggtcatcagtttcactcccattatcatactcagaccgcacatatgccatgtcaatagttcttcttcctgcttcttgccatgctagtaacctagcaggatcaaccttcggagattgacgtctgatggtgaagtaatcagaggataacagagatccatcatcacaatttttctcagtcatgtaacccttttcgcaggagactttgtccatggatacagattgtgaacttttcagtatcatgttaactactctggcgacactaacacatatatctttatgtaagagagccttgatcatatga

SEQ ID NO: 16317 - DNA, 389 bp, Glycine max
agcttattcattgatgaacaatgaaaccttgttttattgaactaattgctttccacatcatctcaggttgccgagattctcaaagatcgtccatcatggtattgtgactgtcgatgcctcaatgtattgagtgtagtctcaacagggaatgggggcacaatagagcttatgtacatgcaggtctactgattattttatacaaaagaaaagttgaactatagtttaaattatcttttaattattcctatgttgttttcttgatattcaaatttgattttttttctaaacatatgcaccaacaacattggcagctgcaagagacttctggactttgagatacgctactagtttggaagatggaagtcttatggtattgagtggaatcttga

SEQ ID NO: 16318 - DNA, 386 bp, Glycine max
agcttgctcatataggtttccttgtttaagagttggtacatagatagcggatgctctaaacatatgacgggagatgcatcaaagttcactcttatctctcccaagaaaagtggacatgtgacttatggcgacaacaataaaggtagaattcttggagttggaaaaatatgtacaaactcatctttcttcattgagaatattctacttggtaaaggtcttaagcacaatttgctaactgtcagtcaattatgtgataaaggctatctaatatcatatgattctcataaatgtgttattgaaaatgagcatgataggaatataaagcatacaggtgatagaacaaataatgtgtacgtgatagatttaagtcaaaaacaataccatga

SEQ ID NO: 16319 - DNA, 353 bp, Glycine max
agcttctcgatatattatgcacatgaatcggacctccgagtgacaagttatggccatttgaatttttcgagagcttacgctgctcaatttcgagcgtctcgatttattatactcctgaatcggacctccgagtgaaaagttaagaccatttgaatttctcgagagcttccgttgttcaattgtgagcgtctcgatatattatgcgcctgaatcggaccttcgagtgacgagttatgagcattagaatttctcgagagcttccgttgctcaattacgaacgtttcgatatattatactcctgaatcggacctccgagtgaaaagttatgaccatttgaatttctcgagagcttt

SEQ ID NO: 16320 - DNA, 348 bp, Glycine max
ttcttctcgatatattatgcgcctgaatcggacatccgtttgaaaagttatgaccatttgaatttctcgagagctttcgttgttcaatttcgagcgtctcgatatattatgcaccggaatcggacttccgtgtgacaagttatgactaattgaatttctcgagagcattcgttgttgaatttcaagcgtctcgatatattttgcgcctgaaacggactttcatgtgacaagttatgaccattggaatatctcgagagcttccgatgttcattatcgagcttctcgatatattatgcgcctgaatccgacattcgtgtgacaagttatgaccatttgaatttctcgaga

SEQ ID NO: 16321 - DNA, 384 bp, Glycine max
agcttgagattttctattaaatttataaccattcctttcatgtgcaatctatacattgaaagccaaaggcccacaacttatgtgcttgatatgtaactgcttactcagtttttgtggatcacatcgaagctcatgctgggagtgtcaacaatctcgctttttcttatccaaacgaacagctttgtgttgtgacctgaggagaggataaggtcatcaaggttaattgtcacataatttgtcatagatatctatatcaatatcaattaaaaaaccaatttcgagtgttcaagatattgcacgtatgggatgccgttactggtgcagagcagtatacttatgagggacatgaagcacctgttattctgtatgccctcatcacataga

SEQ ID NO: 16322 - DNA, 376 bp, Glycine max
  unsure at all n locations
agcttcttattcatattgtttggtacataagcttcttattcacataacaccaatagtattccatttataagcagagattgacgattcaaattacatatttataagagaccaaccaaacacaaagcaaccacagcttataacacccgtaacaaatcctagaacatttgaatttgcaaaggcgggccatgaccactttattctaaaacttcaaacacaacacatacttattatttattgatacatgtattacagctatctctgcttgaaggttatgcatgttgatctcacttgcagctgcatgggtcgcaagtgcagtntgatccacagttgcagccaccgttctcagctgcaacacccatttcagcaccctcgaatt

SEQ ID NO: 16323 - DNA, 361 bp, Glycine max
ttcttgcatgatttacatctccccctttctcaagcaaattcttcttgatatcatcaaaatcttcatgatcccgactcgttggtggaggatgcatgaatgacaatcaattcatggggctccgaataaaagtggagaatggaggataggcgaatagcgctaggcaatcaattcgcggttctcccgactcgttggtggaggatgaatgaatgacaatcaactcatggggctccgaataaaagtggagaatggaggataggagaatagcgctgggcaatcaattcgcggggctgcagactccatggtggaggatgcatgaatgacaatcaactagtagggctacgaataaaagtggagaatggag

SEQ ID NO: 16324 - DNA, 366 bp, Glycine max
ttcttgaaattgaacaacggaagctctcgagaaattcaaatggacataacttttcaaatggaagtccgattcaggcgcataatatatcgagaaggtcgaaattgaacaacagaagctctcgaggaatttaaatggtcataacttgttacacggaagtccgatttaggcgcataatatatcgagacgctcgaaattgaacaacggaagctctcgagaaattcaaatggtcataacttgtcacacggaggtctgattccggcggatagtatatcgagaaggtcggaattgaacaacggaagctctcgagaaattcaaatggtcataacttttgaaacggtagtccgattaaggtgcattatatatcga

SEQ ID NO: 16325 - DNA, 309 bp, Glycine max
atgcaaccttggcatgctatcttgaaagacttggagtatctatataaagagtaataatttgcatcttgaacatcaacggccttggaatcgatgcaatcctcccaatgtgactctctcatgatcgagccatatatgctggagaatgccctatggttcttatgagccttacggtagattttgggcccatggactaagtctgagcccactcatctttgtacatattaaatcacggttccattatttctaggccttatattcaaggcttcatactgaatggagggtaccctactcatgtaagaattttatacc

SEQ ID NO: 16326 - DNA, 382 bp, Glycine max
tgcttgtgccaataaagatggtgaaaaaattcaagaatagttcaataccatttcatctcttgaaaatctacacccttgtggagtggatcccacctcaagagttccaatcttacatacggagagaagatcagtggaagactcaatgacatataagcatctttataggttgatgagtactctcttttgcattcttccattctacttttgaccaaggatagttgaccatattcctcagaagcatcactgaaaatctcatcagcagcctgcagcaccaaatcacttcgtgactgatatgcttggctctcactatcactctcatcagtgcttgattcaccttctattttatgatcatcccattccatggatgtgaccttattattac

SEQ ID NO: 16327 - DNA, 344 bp, Glycine max
agtacctctgttccggaaacctttcttttgtcatgtgcacccaaacccaatctccgggttcgaagacaaccttctttcttcctttgttggcttgcttagcatagcttttattgttcctctcaatttgatctttgactctcccatgaagcttcttcacatagactgtctttgcttgaccttctttatgcttaaaaacagaaacattatgcataggcaaaagatcaagatgagttagtgggttaaaaccataaacaacttcaaaatcatcaaaagtattagtggtcaacatctgatttttgctaacaagatatatagtgactgtgtagcacgaaacaacctcttga

SEQ ID NO: 16328 - DNA, 395 bp, Glycine max
  unsure at all n locations
ttcttgagaccatagacaaacacactttgacaatcatctgctactaccacattgtaaccttcgtcatcacttgggtcagaccgcatatggtcatcagtttcactcccattatcatactcagaccgcacatatgccatctcaatagttcttcttcctgcttcttgccatgctagtaacctagcaggatcagccttcggagattgtcttctgatggtgaagtaatcagaggataacagaaatccatcatcacaattnttctcagtcatgtaacccttttcgcaggagactttgtccatggatacagattgtgaacttttcagtatcatgttaactactttggcaacactagcacatttttctttatttaggaaagccttgatcatatgaagatcaag

SEQ ID NO: 16329 - DNA, 394 bp, Glycine max
tgcttgcacacaagattttccttgcctggcacttcaaaaccttctgcaaaaccttttggttgggtcatatagatgtcttcctctaaatccccatgcaagaatgcagttttaacatctaactgctctaagtgaagattctttgcagctacaatactcataataactttgatggtagtcatctttacaactggagagaagatctctgtgaaatcaattccttgtttttgttgaaaccctgtcaccacaagtctcgccttgtatcttcttctactgacaaattcttcctttagcctatagacccacttattctgtaacactttctttccttctgacaatttaattaaataccacatcttattcttctcaaggaatgccatctcatctgtcattgcta

SEQ ID NO: 16330 - DNA, 389 bp, Glycine max
atcttcaacatcatactccttccattgtgctggaactacttcacatggacttgatggggcctatgcgagttgaaagccttggaggaaagaggtatgcctatgttgttggggatgatttctccagatttacctgggtcatgcttcatgccatagaactttcctataatctctgggctgaaaccatgaacacagcatgctacatccacaacagagtcacacttagaagaaggactccaaccactctgtatgaaatctggaaagggaggaagcctactgtcaagcacttccacatctttggaagtgcatgttacatctttggcagatatatagcaaaggagatagatggatcccaagagtgatgcaggaatattcctgggatactctacaaa

SEQ ID NO: 16331 - DNA, 380 bp, Glycine max
agcttctggtgggacatcttgacttgctttccaatctgacattcaccacagattctgccttcttctattttcagattgggaatgcctctaacagcacctttgtcaatgattttcttcatgcctcttaagtgcagatgtccaaatctttgatgccatattttgacttcatcttctttggagaatagacatgtggaggagtaactggtttcttgaggtgtccataggtaacagttgtcctttgatctgctgcccttcattaggacttcactcttctcatttgtcaccaagcattctgactttgtgaagtttacattgaatccttcatcacacaattgactgatgctgatcaatgtcgcagtcagtcccttcaccagcagtac

SEQ ID NO: 16332 - DNA, 284 bp, Glycine max
agcttctcgatatattatgcgcctgaatcagacttgcggtgaaaagttatgaccctatgaatttctcgagagcgtgtgttgtccaattacgagcgtctggagatagtatgcgcctgaatctgactttcctgggatagagaatgaccatatagaatgtggcgagagcttccgatcttgtatatagagcgtatggatgaatgattaaccggaatcggacttccgtgaggcaatctatgaccatgggagtaccgagatagcattccctgcttaaacacaagcgtctg

SEQ ID NO: 16333 - DNA, 388 bp, Glycine max
agctgctgcgagattttttccttgagaagctagagcttagctacgcacacccatctaaaaactaagctcaccttcttgagaagctagagcttagctacacacacccattttaaaactaagctcacctccttgacaaaatacatgaaaatacaaaaaaaagtccctactacaaagactactcaaaatgccctaaaatacaaggctaaaaccctatactactagaatggtcaaaatacaaggcccaaaagaaggaaaaacctattctaatatttacaaagaagagtgaatccaaccttgacccatgggctggaaaatctaccctaaggttcatgagaatcctatggccttctttggtagctatagcccaagcctcttggagtcttctatc

SEQ ID NO: 16334 - DNA, 379 bp, Glycine max
  unsure at all n locations
atcttttgcttcatctgtagtcatttgacttctggacaaaaggaaggtgatgaactaaggaggaattcaaatgtaatggagattctcagaaagacaaggtttccccgagttcaagacatgggagatgagagttctcctcagacaattctggatcatgagtaagcccttcatctcttttccttgaatctttactagcaactgatgcttagagatcgtgaaactaaataaaatgcagtcctaagtcttaagttttaccctggccaagacctaaacttgtggtttaattggtgtagtcgaataatttggctgggggatttaaattaccggatagccctttcttaccgtgcagcanaggctcttgttgagatgcataattgga

SEQ ID NO: 16335 - DNA, 333 bp, Glycine max
tagcttgatacgtatccacaaacgaggttgaatgccaccattcttgatgtggtgtataagaaagtgatgaagctactaattgtatggagcatgtaccccattccttataacacgagcgtttcacctatcttagtggtcccttagaactcacgcatccctattgggaggaaccatgataatgagttgatctcgactataaaggccaatctttggcatgtctgcgtggattatacgagactgcccgctgctactaggttggatcacttgcctctctcattcattgattaagatctggagaggttggcatgtttatcacattattgctttcttgat

SEQ ID NO: 16336 - DNA, 374 bp, Glycine max
ttgcatgcattcttcgggaacgacaccttccggcaaccaggaattaactttccgagaacgcgcgctttcttctgcacagccggcaagcttcttcgaatctcatgcgtcgtcttcttcatgaattcgttggcggagtacttcttgaccttcttgtggtgtctctgcttccagcggcagatcggatttgagagaatggcgcggctccggcgagttctgcctttggcagtggcggcgaagacgcggtcagcggaggcgcggacttcgagggcggcggtagggttgctgttgcggcggagcgagtggatgagcttggaggagtagatgcgctgttcggttatggaagtccaggatggagtgagagcgaatgagttttg

SEQ ID NO: 16337 - DNA, 377 bp, Glycine max
agcttgagaaagagacaccttttggttgcaaacaatgtataagaaacaagtgtgacacctaaattccaagcatgcgaaggttcaacatagaaataacaaaactaagaataataaataaagggggggaagagttgaatttaatgaatggattacaattaccaatggtgggggaaagatcttcaacagaacttgaaataaagctgacaagtaggctactttttcccaccccggaatctccaatcaacaagatcttgaaagagagatcatagccactgctctgacctgaggatgaactcattctctcttcctctgatgaatgtcttaggtgtgtgtgtcaaaaagtacagtgaaagaaacgtatgcaagggtgagagaga

SEQ ID NO: 16338 - DNA, 376 bp, Glycine max
atctttgatgaaaaatgtggagaggttaatgaaacaacgagatgatgcgctccatgagaggttggatcaaatggagaatagatatcctaatggagaagaaaggaggataagagggaatgatggtgttcctagacaaaagcgaattgatggtattaaactcaacattcctccctttaaaggaaagaatgatccggaggactacttggagtgggagatgaaaatagagcatgttttctcgtgcaacaactatgaggaggaccaaaaggtaaagcttgccgccacggagttttctgactatgctcttgtgtggtggaacaagctacaaaaggagagagcaagaaatgaagagccaatggttgatacatgggcagagatg

SEQ ID NO: 16339 - DNA, 377 bp, Glycine max
atcattatacatagtccgcctttgcttgaccttctttatgcttaaaaacagaaacattaagcaaaagatcaagaggaattagtgggttaaaaccataaacaacttctaaaggagaacaattagtggtgctatgaacaactctattgtaagcaaattcaacatggggtaaacaagcttcccaagtttttaagttattcctcaaaactgtcctaagcaaagttcccaaagtcctattaacaacttccgtttgcccatcggtttgtgggtgacaagtggttgaaaataacaatttagtgcccaacttgcttcacaaagtcctccaaaaacgcagatcatgaagcctaggtataggatgcgtatacttaatggcgatgtta

SEQ ID NO: 16340 - DNA, 403 bp, Glycine max
  unsure at all n locations
ctaagcttaacaagttagcctccatcctcatttgattttatcctgaacggaccattcaatccctggaggaccgtttgaggtcatgtgtcttatagcaaaaggggagagctttctttcattgatagagttcacttacaacaacagttatcactctaccataggcatggctccctatgaagctctgtatggtaaaaggtgtaggacacctctatgttggctaaagccctgagaagacctcaccttaggacttgaagtggtacaacaaaccaccganaaagtcaagttgatccatgaaaggatgaggactgctcagagtatgtagataagttatcacgattagaggatgaaagacttggaattcgaggatggcgatcatgtattctagaaagtcactctgtggact

SEQ ID NO: 16341 - DNA, 431 bp, Glycine max
gacctataaaactaagctatgctgcaacattataatagaccccctcagcttctaaaccaacaacagcagaataattatgatctttcaagcaacacatacaatccagcttggagaaatcatccaaatctgagatggacaagtcctccacaacaacaacagcatgttccttcttttcagaatgctattggtccaagcaagctgtatgttcctcctccaatacaacaacaacagtcacaacaaagacaacaagcaactgaggctcctcctcaaccttccatagaagagttagtgaggcaaatgactatccagaacatgcaattttagcaagagacaagagcctccattcagagtttgacaaatcaaatggggtagatggctactcagatgaaccaagctcagtcccaaaattctaaaaaattgccttcacaaac

SEQ ID NO: 16342 - DNA, 413 bp, Glycine max
  unsure at all n locations
tatgaaacctaaagaaaacaagaaataatatgtcttaatattacaatngatatgatttttgaaaagaaaatattataaaaaaacaaaactaaccatgttggatggcatgtgcttaaatctgtaataacagtagtaaaaacaatcttctttaaaagacccttagacctcaaaattcgaagtggaacgtgctgcatcagtggatgcacactgattattatatctggctgatatttcattaggcctttagcaacctcgctgtaaaaagagaaaaagatattttaactgtgacatttgatgttacatcatatttgagaagagatacacatgcacaagaaagtatttttctgaaacatggaatgcagaaaaagtcaataagttttgtctaatattaacacaatgcacaacatacattg

SEQ ID NO: 16343 - DNA, 406 bp, Glycine max
tagtgacataagccaaacacatggtattggctaatgtccctatgaaagcccatccatgtcccaggttccaagcaaacacagccattccccaccaccacacctgctctccaaagtaatttggatgccgagaataataccacaaccctttgtcaagaatagggacctccttgttctttctactcacaaagttgtaaagctgagtatcagcaatgtatgccgtgacaatgccagatacacacacaactatggctaccaagtcccacatgctcagaggctggttcaccgagtggatgacatagaacggaagagacaatccaatcagaaacacctgcaaggttgtcttgatgtaaattaaaagtaaaagcaagggaaaatgatgactaagagtaaccttaattacctgctg

SEQ ID NO: 16344 - DNA, 414 bp, Glycine max
tacatcaataggaataataataaaaaagaaggcatatattttctgccctctatagctctacgattgtataattggcccctcaaaaaattagttacacatttatcttataaaatttaataattttgaccttttgttattttgccatcaaatttttaacataaaggactaatgtgatatttaagtgataaaataacacgaatacattaatattataaatgacatgatattttaaatatagactaatatgacatggattgttcaaattgtgatcattgttactacgtcactaaactattagtgcaagtagcatatatattagattactagtttattttttatatcgcgtcaatgctatattattacttaaatatcatgtcaataattgttaaaaatcactaacgtaaaaaaatgtgg

SEQ ID NO: 16345 - DNA, 368 bp, Glycine max
aaactcaagctaaaaaaggcatgcgaagtgggtggaattcctagtgcaattcctcttagtcatcaaacataggaagggaaaaggtaatattgtatccagtgctctttctcggcgtgatgcatcactttctatgcttgaaacaaaatggattggtctagaatgtttgaaaagcatgtctgaaaatgatgaaactattggagaaatttgtaaaaattgtgaaaaatcctcacataatggtttctgtaaacatgatcgcttacttgtcaaagacaacaaattgagtgtgccttaatgatatagtagaaatacgctcgtttgtgaagcacatgatagatgtttaatggggcatcttggggtccaaaggactc

SEQ ID NO: 16346 - DNA, 372 bp, Glycine max
  unsure at all n locations
atcttcttaanagcacttgactcgatttgcctaattctctccctactcacacccaacatctcccctatctcttgcagggtcttcgtccttccatcatccataccaaatctccatcttaccacctgcctctctcttgcattgagactgtccagagcctcttctaggtccttcttcatgaactgcttaaggagctgttcttcagctgtttcggcatcaggatcagaaattacttcctggtaaaaaacacacaagtatcagcaaaatgaacatcaaatgaaagcaaagagttttttttttttttttctggagcaaaaatttgaacgagattaggacagactgagggtttaagattctggttgatcccaatctttt

SEQ ID NO: 16347 - DNA, 384 bp, Glycine max
  unsure at all n locations
tattcttcattaagaggcttcctctagaagcttcctcgtggcttctttgagaagttttctcaagaggcttctttgagaagctacatccttatctatccatccctctattaactaaattaacttccttaaaaataattacggatgaaaataacgcaacaaataatcaaacatcaaacataattactaataatatatagatatatatatcagggtgttacacatcatatattgagacgctcgaaattgaacaatggaagctctcgagaaattaaaattgtcataaattttcacacggatgtccgatcaggcacatcagatatcgagacgctcgaaattaaaaaaacggatctcgagaaattcaaatggtcataattntcacacgga

SEQ ID NO: 16348 - DNA, 371 bp, Glycine max
ttctttcacatggatgtccgattcggggacataatatatcgagacgctcgaaatcgaacaacggaagctctcgataaattcgaatggtcataacatttcactcggatgtccgattcggggacataatatatcgagacactcgaaattgaacaacggaagctctcatgatattcgaatgctcataacatttcacacggatgtccgattcggggacataactcatctagacgctcgaaattgaacaacggaagctctcgagaaattcgaatggtcataagatttcacacgaatgttcgattcggggacataatatatcgatacgctcgaaattgaacaaccgaagctctctagaaattcgaatggtcataaca

SEQ ID NO: 16349 - DNA, 358 bp, Glycine max
  unsure at all n locations
tcagctntgtccccaaagcttcatgtagactcgttttaaatcgcgaagtgaacctcggatccctgtcagatacaatactacaaggaattccatgcaaccttactacttccttgatgtacaactacactagctttgccattctatacttcatccgaatgaaatgttatgaccattcgaatatctcgagagcttccgttgctcgacttctagcgtctcgatatattatgtccctgaatcgaacatccgagtgaaatgttatgactattcgaatttctcgagagcttccggtgttcaatatcaagcggctagatgagttatgtccccgaatctaacatctgtgtgaaaagatatgaccatt

SEQ ID NO: 16350 - DNA, 375 bp, Glycine max
tgcttgcagcgcatttctgatgaactttaccagaaattgcggtaggaggtcccaggactgggaagctcccagtgaagggttctgcctttcttacagctgaaggatcatccagatcaagccttgctataagttcaccagcctgcaaaaggtgatacaattttattatctttttcaatttcaacaattgtacttcctatgtggaatagaatgctatatacctgcattgcttgaccttcagacattttgaaatgaataatcccagaagcaggcgaaagaagaggcatgcacattttcatgacctcaacttcagcatacggtgtgtcagcatcaacatgactgtcatctgcaaccaaatatctcagaagcttgcatggt

SEQ ID NO: 16351 - DNA, 381 bp, Glycine max
ttgtaagttatatattcaatatattttatatgttttatttatgtacatgtttatattttgataaatgaataattttaggtagtataagtcaatatatttgatatcttttatttatgtacatgtttatattttgataaatgaataattttaggtagtataagataataattttgtatagggctctttgtattgttaatgttatatatgctagattatattttgataaataaatagttttaggtagtataagattatagtttgaattgttaatgttatatggtagattagatttaggtttatatgataaattaagaatacttttacatactctaagttattaattttatatggtagattaggaatatttttaattttgatatg

SEQ ID NO: 16352 - DNA, 419 bp, Glycine max
  unsure at all n locations
tgtgtctaagctgactatgtagctgctcaatatcttagttgttaatgctttcatggggagcaagagcaattgatggagctgaggtagaagctgaagcacagttgatgattggaatgattatctgcctaatgtcaaagtcatcagagacacacacccacatctntaattggaaaagttcatcaatcctcttatcattgaacaccaactttgcaagtgtagtcttccccatgcctccaagacccactatgggaataacacacacacttttatctccatcaccatccccatgagggtgaggttgcatcaaaagcttgataatttcttccctatcattatcccttccaatcactgctgaagcatcaatatgtgaataagtcatttctcttctttgcacaagtctgtggtcaacagaaatcctc

SEQ ID NO: 16353 - DNA, 383 bp, Glycine max
  unsure at all n locations
ttattcttcttcaactgcacaaggctcttaatatttgaagagtatccttgtggaaccttcacccgacgaagacactgacaaaaacttatctattccttcttggacaaagtatggcaggctgggggcaagtaaattttcttcccatcagaccttggatgcaactgtgatcgtatacccatatcagctagatcttgacgggtattcaagccatccttcgtcttgccttgaatgttaaggagcgtcccaatcacactgtcacaaacatttttctccacatggataacatcaatacaatgtctaacgtcaagatcacactagtatggaagatcaacgaaaatggacctcttcttccatatgcaactctgactnttatccttcttttg

SEQ ID NO: 16354 - DNA, 405 bp, Glycine max
ttgatggagagatatggcctcctctagtttctcattcttatacaagaatacaacagatttatgaacatttattttttgtcccgagccactacaaaagcatacataatagatctgataacctaagcttgatgtacagaagcctcaaccacgaattatgtcatcgatgaagaatacatgcaccactgtgactcctgtactattcccaaaccagaagggtttgcaattaccctcattgactgacttttaaatgagatatgctaggctctccatgtgcaagacaaagaggtacgggggtgaagggtccccttgcctcagtccccatgtaggagcaagagaattgcaattgatagctaacgaagtgctcatacaattagagagaatatcagtcatccaagagggaatctt

SEQ ID NO: 16355 - DNA, 415 bp, Glycine max
tggtcttaattataccaagatagatgtttgccctatgagttgcatgttgtattgggaagaagatgaaaatttgcagatttgcaaacattgcagaaaatctagatggaaagcaaaaggtaataatggtaaaaagaatgtactagcagatactttcctttgaaaccaaggttgcagaggttatttgtgtgttccaaaatagcaaagtccatgagatgacattttttaaatagcaacccaaatggattgttgaggcatccaagagttgctaatgcatggaaaagttttgatcaaattcaacctgaatttgctttagaacctagaaatgttcgccttggccttgcaagtgatggcttcagcacatgccgaaccatgaataataagcatactatatggtcggtgcttctaattccataca

SEQ ID NO: 16356 - DNA, 399 bp, Glycine max
  unsure at all n locations
ntgtgctccaactcaacaggtaggtgatttgatttattatagaccaattggaagggaccaatcctttgtatgctattttgtatgcccacaaagcttcatctagtttttgggaccaatccttccttgactgagcaattgttttctctaggatctcctagaattccctattagagacttcagcttgcccattggtctgggggtggtaaagtgaagctaccatgtgtttgacagtatagtgttggaggactttcttgagttgggaattacataaagaagatcctccgtcacttatcaatacccttggtgatgcaatcctaccccgcaagggcattggatagaaaactccaagtagattgggccagatatgcaagagaaggccctatggttcttatgagcctt

SEQ ID NO: 16357 - DNA, 419 bp, Glycine max
  unsure at all n locations
gctacaaggattntgcgagactccttngagggaaatttaatttgtataattgctactatttccccgtctgcttgttgtatggaagaaacacttactacattagactatgctagccgtgcaaaaagcataaagaataagcctgaggtcagttaccactgctattgttccttacaagttacaattcttctaaaagcagttttaaagctttgtgtgttttttaaaaggcaaaccaaaaggtttcgaaggttgttttgttgaaggacttgtacagggaaattgatagggtgaaagaaggtacactcaccaccactattagttttggaatgtagagaagattttgtatcttatcttttgtataatatgaatattgcagatattcgagcaacaagggaaaagaatggtgtatatatttctcatga

SEQ ID NO: 16358 - DNA, 382 bp, Glycine max
ttcttgtgccaataaagatggtgaaaaaattcaagaatagttcaataccatttcatctcttgaaaatctacacccttgtggagtggatcccacctcaagagttccaatcttacatacggagagaagatcagtggaagactcaatgacatataagcatctttataggttgatgagtactctcttttccattcttccattctacttttgaccaaggatagttgaccatattcctcagaagcatcactgaaaatctcatcagcagcctgcagcaccaaatcactttgtgactgatatgcttggctctcactatcactctcatcagtgcttgattcaccttctattttatgatcatcccattccatggatgtgaccttattataac

SEQ ID NO: 16359 - DNA, 381 bp, Glycine max
tttatcttgatgcaatcctaccccgcaagggcattggatagaagagtccaagaacattggaccaaagatgcaagagaaggccctagggttctcatgagtcttaaggtagatttcgggcccatgggctaagtacgagcccacttatctttgtaaatattagattaaggtttcattatttttgggccttgtagttagggctccataatgtaggtagggtgccttagaaatataggatttttcagcccttgtattttagggcacctagactagtttttgtattaggggtagttttgtaatttcatatgcactaagtgaatatttgatcgtgtggttggaaataaatttaattgaattggtagaagcccaatccaattaaatttt

SEQ ID NO: 16360 - DNA, 383 bp, Glycine max
tcattcttctacattcaatttcgagcttttcgatatattacgggactcaatcggacatccgagtaaaaagttattgtagtttgaatttgctcagggcttcggtattccatttcgagcgtctcgatatattacgggactcaatcagacatccgagtaaaaagttattgtcgtttgaatttgctcagagcttctacattccatttcgagcgtttcgatatattacgggactcaatcagacatccgagtaaaaagttattgttgtttgaatttgctcagagcttcggtattccatttcgagcgtctcgatatattacgggactcaatcagacatccgagtaaaaagttattgtcgtttgaattggctcagagcttctacattcaat

SEQ ID NO: 16361 - DNA, 411 bp, Glycine max
gtgagaaaattcaaacgacaataactttttactcttatgtctgattgagtcccgtaatatatcgagacgctcgaaattgaataccgaagcgctgagcaaattcaaacgacaataactttttactcggatgtctgattgagtcccgtaatatatcgaaaagctcgaatgtgaatgtagaagctcagagcaaattcaaacgacaataactttttactcggatgtctgattgagtcccgtaatatatcgagatgctcgaaatggaataccgaagctctgagcaaattcaaacaataataactttttactcggatgtccgattgagtcccgtaatatatcggaacgctcgaaattgaatgttgaagctctgagcaaattcaaacgacaataaacttttactcggatgtctgattg

SEQ ID NO: 16362 - DNA, 378 bp, Glycine max
tattcttgaaatcatctattcagatgtttgtagccctatacaagtagagtcccttggaggaaataggtactttgtaacctttatagatgatttcactagaaagacttggatttatatgatcaaaagaaagagtgatgtgtttaatatatttaagaagtacaaagcttatattgaaaatcaaagttctaggaagattaaagtgttgagaactgatggaggtggtgaatacacctcaaaagaattcctagaattttgtgatgaagcaggaattgtacatgagttcacaccaccctacactccacaacacaatgggttagcagaaaggaagaatagaaaaattatgaatgcggttaggagaatactcaaatgcaaggatct

SEQ ID NO: 16363 - DNA, 420 bp, Glycine max
  unsure at all n locations
ntaaataggcattcctatctgcaaaagaataaattttctggtagaaaataaactcaacccaagtgtgagatggttgatgcatccaataaaaaggtgagacttcataaatcataaaaatgatggtttactcaaataaattacattttatttttcaagaacaatttaaattgtgttgagattttttttggtaaatcataaaatgatgtagaaattaaatttaaagatagaaatgaaagagattgacaaggagaagtaattgaattaagacatgaaccatcaatgagttgtatatggggtttgtagtcaagaactaatctttatgtgttaattattaaatcatttaatttatatatgaaaatactagaaattttaaagacaattatttataagaaacttataatatgactatacttgattcac

SEQ ID NO: 16364 - DNA, 377 bp, Glycine max
atcatattataaattcgaatggccattgcttttcactcgaaggtccgatcaggcgcatcacatatagagacgctcgaaattgaacaacggaagctctcgagatatgcaaatggtcataacttttaactcggaggtcggattcatgcacattatatatcgagacgcccgatattgaacaacggaagctcttgagaaattcaaacggtcattactttttactcggaggttcgattcaagcgcgtcacatatagagacgctcgcaattgaacaacggaagctctcgagatattcaaattgtcataactttcaactcggaggtccgattcatgcacatataatatcgagacgctcgaaattgaacaatggaatccctcgag

SEQ ID NO: 16365 - DNA, 429 bp, Glycine max
tactcaagcttaaaggagaagttggttttctgaactctaaactttttactttacttattcaataaagatgctgaatgagagctcatatatgcttgatgaggtgctacagcttgggaagaatgttggaaaccagagaggacttgggtttaatcataaacctgctggcagaataaccatgacagaatttgttcctgccaaaaacagcactggagccacgatgtcacaacatcggtctcgacatcatggaacgcagcataaaaagagtaaaagaaagaagtggaggtgtcactactgtggcaagtatggtcacataaagcccttttgctatcatctacatggccatccacatcatggaactcaaagtagcagcagcagaaggaagatgatgtgggttccaaaacacaagattgtcagtcttgttgttcatac

SEQ ID NO: 16366 - DNA, 407 bp, Glycine max
tgcacacaagattctccttacctggcacttcaatttcttctgggtgggacatatagatgtcttcctctaaatccccatgtaagaaagtagttttaacgtgtaactgctctaagtgaagattctctacagctacaatatttagactaactctgatgatagtcatctttacaactggagagaagatctctttgaaatcaattccttgtttctgctgaaaccctttcaccataagtctcgccttgtattttcttctaccatcatattctccctttagcctataaacccacttattctgtaacactttctttccttctgacaattcaattaaagaccacgtcttattcttctgaacggatgtcatctcatctatcattgctagctcccactcaatagaatcattccccttc

SEQ ID NO: 16367 - DNA, 377 bp, Glycine max
tctttctttttagtctcagctgatgaagatgaattcgtggctacttcatgcactcctctaatgacaataacatcatttctggcactaaattgctgggagtttgaagccgtcttctcaattaaatttctggcttgagcaggggtcatgtctccaagggctccaccactggcagcatctatcatacttctctcaatgttactgagtccttcataaaaatattggagaagaagctgctcagaaatctggtggtgaaggcaactggcacatagttttttaaatctctcccagtattcatataggctctctccactgagttgcctaatgcctgaaatatcctttctgatggcagtggtcctagatgtagggaagaatttctc

SEQ ID NO: 16368 - DNA, 382 bp, Glycine max
  unsure at all n locations
taatcttattttgcaaatattnacaatagacctcctgaacctcagcagcaaaatcaaccacagcagagcaattatgacctttccagcaacagatacaaccctggatggaggaatcaccctaaccttagatggtccagccctcagcaacaacaacaacagcctgctccttccttccaaaatgctgctggcccaagcagaccatacattcctccaccaatccaacaacagcaacaaccccagatacaaccaacagttgaggcccctccacaaccttccctcgaagaacttgtgaggcaactgactatgcataacctgcagtttcagcaagagaccagagccttcattcagagcttaaccaatcagatgggacaattagctaccc

SEQ ID NO: 16369 - DNA, 294 bp, Glycine max
gatacccagcaggcacagaatcacaaaccaatacctgatgcaagggtccgcgggttgtgcaccactactgaccacaatacagaccggtgcccttccatgcagcaaccaggaacaatagagcagccagaagcataagctgcaaatataaacaatagacctgctcaacctcagcagcaaaagcaaccacagcaaagcaattatgacctctgcagcaacagatacaaccctggacggaggaatcacctcaacctcagaagggcagccctcagcaacaacaacaacagcctgcaccat

SEQ ID NO: 16370 - DNA, 383 bp, Glycine max
ttcttgggtgatatggaatctctgtaatttggagaataaaattatatcagtagaaagaatacttcaatatactagtattccttgcgagcctccccttgttgtagaagacaatcggccagatccttcttggcccttgtatggtgaggttgacatacaagatttgcaggtagattgagttcttatattttttaaagttttgtacttttattttctttcattttgtggataattgatttataaaattcatgctaaggtttttttttcctaaatggttacaagctagtatctgaaacagaataattgtgccaacatatttaatagcataatttttacactatgtttgtaatgatgtgttgccatgatgaaggttcgttatgctccac

SEQ ID NO: 16371 - DNA, 420 bp, Glycine max
tctctcagcaactttgactgcaaaacttcacaggagctacatggcttctttgcaagtgacaagacaagctttggcatctgagtctcagagaacaccaccctcagtgcaaaatgcaacaacctccacaaccacaccaattagcaacaacttcagtgtgaagagtgagcaaactcatgcagtgttgccacataagagaccagaggaggagcaagagtcagaggcaaataggggtgtgaaaagggttaaggctgtggaaaatgttcctctgcaattcaagcctcttgaggaagatcacatagagcaaatgattgaggagcttcttgattatggatctattgaactctgctctgtcatttcaccccaggccctctaattgaatgtgcatgtttttgagctgaatttaaagtcacaattgtaggt

SEQ ID NO: 16372 - DNA, 413 bp, Glycine max
  unsure at all n locations
ntgtataatcacatcagcccacaatttgtatgtttatgctctctcaatgatgttagaggaagttcagccaaatatgggttagcatatctgcaagagggaattctttctgatatagctggtgagaatatcaaagtggataatgagcacaaaggaattccaatcctgattaggaagttgcacggcaaaagggttcttttgatacttgataatgtggacaagctggagcaattggagtatttagcaggagaatgcaattggtttggtttgggcagtagaattatcataactagcaggtgtaaagatgttctagctgctcatggagttgaaaatatatatgatgtacctacgttaggatattatgaagctgtgcaacttttaagttccaaggtaaccacgggacctgtacctgatta

SEQ ID NO: 16373 - DNA, 418 bp, Glycine max
  unsure at all n locations
ntaacattcaatttcgagcgtctcgatatattacgttcctctatcagacatccgagtaaaaagttatggtcgtttgtatttgctcagagcttccacgttcaatttcgagcgtctcgatatgttacgggactcaatcagacatccgggaaaaaagttattgtcgtttgagttggctcagagattcaacattcaatttcgagcgtctcgatatattacgggactcaatcagacatccgagtaaaaagttattgtcgtttgaattggcttagagcttcaacagtcaatttcgagcgtcttgatatgttactgctcctgaatcagacatgcgagtgaaaagttatgaccattttaatttcttgagagcttccgttgttcaatttctagcgtctcgatatgttatgtgtctgaatcggacatg

SEQ ID NO: 16374 - DNA, 381 bp, Glycine max
atcttgcgttttatttcagacattcctttatttgcgcagcccaagtcagtatctagctcctctcgcatctctgatagaagtgtcttctgtagatcttccaggccattgattttgtttgatttttctctaacattggaaagaaaacttgcggcatcaaagtggttcacaatgttgttatacaaagctgtggcaagttctgtttttccgactccagggagtccccatacacccaacatgcgtacagtttcatcataaggcttcatgtctaggagtgacattacctcttccatgcggggccaaagtccaatagggttctgaccagtatgtaaaggattatgagctatgtgtttatagaccttgtcagctatcttttcaataaat

SEQ ID NO: 16375 - DNA, 421 bp, Glycine max
tgcaagttggtaggggatgagaagaataggctgttgataatgatgtatggaatccgtaaattgaaggggattatggaggtggagaagagaaagaatgattctgagaggaaggaagacactgaagcatgcaagttacttggagaagagaagaaaaaggttgctgaaaaggaaaaggaaattggtagattgaaggggtgtatagaggagaagaagagaagggttgattctgagaggaagaaagctactgaagcttgcaagttactagaagaagagaagaataaggctgccgtaaagggggagattgccagaattgaagcagagaaggcagtgaagtatagttttcagattggtcaattagagaaacaggttaatgaagcaaaaacaaagttggtgtctgagatttctacgtttagagaggcaa

SEQ ID NO: 16376 - DNA, 420 bp, Glycine max
  unsure at all n locations
ttgtatgggtccatttacaaggagtttgagggttatgtnttatttccgacgttagagaaacctcaaatcaaaagggcctacaacatcttcaacaagagcttctatcagagatacttgggcgcaacgatattaagctaaaaaaaatgaagaaatcaataaaaaaatagacttgggttaaaaagagttctaatatttctagacgatgttgataacatcgaacagatggagaatttggcaaaggaatgtgattagtttggtcctagaagcatgataatcataacaacaagagatacacatttgctagatcttgttggggtcgaaaagagatatgaagtgaaagtgctaaacgaccaagaatctctggagttcttttgtaagagtgcctttagaaagagttgtcctgaaacaaactacaaagat

SEQ ID NO: 16377 - DNA, 367 bp, Glycine max
ttcttgcatccagctcacgaatggatgattaacttgaagaagtctaagaaccaattatatgtttgttgaggaaacatcatccagagtcttgaatcattggtgatcataaggaaaaagtccagacaaggaactctttcaagcatacaactctacttttcgagatcgggccgaaacgcatagatgatgctatgtctaatgaatactgggtcaaagcaatgaaagataagttggaccagtttcagaagaatgatgtctagaagcttgtagaacttcccaaaggcatatatgctattggagcaaagtgggtgttcagaaacaagctcgatgaaatatgtaaggttgtgagtggaacaaagctaggcttgtg

SEQ ID NO: 16378 - DNA, 420 bp, Glycine max
  unsure at all n locations
ntaacattcaatttcgagcgtctcgatatattacgttcctctatcagacatccgagtaaaaagttatggtcgtttgtatttgctcagagcttccacgttcaatttcgagcgtctcgatatgttacgggactcaatcagacatccgggaaaaaagttattgtcgtttgagttggctcagagattcaacattcaatttcgagcgtctcgatatattacgggactcaatcagacatccgagtaaaaagttattgtcgtttgaattggcttanagcttcaacagtcaatttcgagcgtcttgatatgttactgctcctgaatcagacatgcgagtgaaaagttatgaccattttaatttcttgagagcttccgttgttcaatttctagcgtctcgatatgttatgtgtctgaatcggacatgcg

SEQ ID NO: 16379 - DNA, 385 bp, Glycine max
  unsure at all n locations
attctttatatatatcgaggcgctcgaaattgaacaacggaagctcttgagaaattcaaatggtcataacttttaactcggatgtgcaattcatgcgcatcacatatagagacgctaaaaaatgaacaacggaagctctccaaaagttaaaatggtcataagctttcacactgatgtccgattcaggcttatattatatcgagacgctcaaaattaaacatcgaatgctctcgagaaattcaaatggtcataactcttcactcggatgtacgaatcaagcgcatcacatataccgacgctcgaaagtgaacaacggaagctcccgaaaaattcaaatggtcataactntacacactgaggtccgattcaagcatataatatatcg

SEQ ID NO: 16380 - DNA, 377 bp, Glycine max
ttcttttcctctagctgttctgataaggtttccaaacgttagagaaggagaagagattgaagccttcattctactgcctgcatgcaatgaatatttctccctaacaagatcaattttcaaatcgcaacggtgaaaatatgcagaaatgaatttcgaaccaggtgtcccaatttcacaatgatccaacggttaatgagtctgggattatagttttactaggacaggttttgggtctctgcaggaaaagaaaaagttaagatgagaagggaatttctctcacctccaactctgattcgcaatttccatcggtgagaatacttgaatatgagctgcaaacttggtgctcaaatttcacaacaatccaacgattaacgagt

SEQ ID NO: 16381 - DNA, 408 bp, Glycine max
  unsure at all n locations
tgcatgagatgcagggtattttctcacaaatattattcattactccaaggttttccatagttatgactttggcaagtattatttggtactccaaggtgttttttaccaagcaatatacacacacaacttaccttgcaagaataacctatgagcaactgaagttataaaaatagcatgagctctctgccaatttgcacactgaagaaattggtcaagggcttttgagtgatccccattataattataataaattgcctgcaccgccataacaaaatcattcaaacaacaataagagtcatttaaagaataatacaatactttgcaacnattccagcattagcaagcccattaatcagtaaagaacaccatgacaacaatttaattcagtttagtcataaattgatcata

SEQ ID NO: 16382 - DNA, 335 bp, Glycine max
tctttcttctgcaagccctgttctatatgctagattgaatagtggggagcttgctcttcgacttggtgctgatcatcctgctggagatatgacattgttggaaactggcgaacctgtgtattctccaatcactcaggtttgataaatatttttttttctgtataatcactatttaaaaatactcttgtacttgagaactttgggactgtttcatgtatgaaggacctttgcttacagaaaatctaatcatggaaacagaggagtctgtgctgcggacagggaggtctgtatgctaactgagattcatccatgacacaatctgttatcttaaatct

SEQ ID NO: 16383 - DNA, 357 bp, Glycine max
ttcttgtagaactccccaaagtaagatctactcttggagcaaagtgggtgttcaaaagctagacaaaataggtaaggttgtgaggaacaatgctagacttgtgaccaaaggttactcacaataggaaggtatacattatattgaaacttttgctcctgttgctcatctagaggcaatatgcattatactatcctttgttgctcatcatggtatgatgtggtatcaaatagacgtaaaaagcactttcttcaatggacttatcaagaagtttatgtggaacaaccccctgcgtttgagagttctatctaccctcatcatgttttcaaaattaataaagctttgtatgtgttaaagcaa

SEQ ID NO: 16384 - DNA, 376 bp, Glycine max
atcttgtaatcgattacacaagtcttgtaatcgattaccagaggggatttttagaaaataatttccaagagtcacatctattcaaatgttttatgaatggccatcaaaagtgacttggaaacacgaatttaaagagagttttcattgcccaaacagttttatgctctcaaaagattaagagtttttctgaactgaaatgtcttatcctctcaaaaagattccttggtcaaccacttgcatattcaataaggaattttgattgatcttcattgtacaatctatctcttttaagagagatttcttcttctcttcttcttatttctgacacaagatttaagagaccgtgggtctcttgttgtagagaattcttgaacac

SEQ ID NO: 16385 - DNA, 364 bp, Glycine max
ttctttcattgttcaattcccagcgtcacgatatattatgcccctgaatcggacctccgagtgaaaagatatgaccatttgaattgctcaagagcttccattgatcaatttcgagcgtctcgatatattatgcgccataatccgacctgcgagtaagaatttatgaccctttgaattgctcgagagcattcgttgatcaatttcaagcgtctagatatattatgtgcctgaatcggacctccgagtgggaacgtatgaccatttgaatttctcgagagcttccattacttagtctctagcatctcgatgtattatgtgctctaatcggactttcgagtgaaacgttttgacgcattcgaatttc

SEQ ID NO: 16386 - DNA, 350 bp, Glycine max
atcttctcgatatattatgcacatgaatcggacctccgagtgacaagttatggccatttgaatttttctagagcttccgctgctcaatttcgagcgtctcgatatattatactcctgaatcggacctccgagtgaaaagttaagaccatttgaatttctcgagagcttccgttgttcaatcttgagcgtctcgatatattatgcgcctgagtcggacctccgagtggcgagttatgaacatttgaatctctcgagagcttccgttgctcattttcgaccgtcttcatatattatactcctgaatcggacctccattgaaaagtttgaccatttgaattctccagagcttc

SEQ ID NO: 16387 - DNA, 375 bp, Glycine max
tcaattttgcagcgcatttctgatgaactttaccagaaattgcggtaggaggtcccaggactgggaaactcccagtgaacggttctgcctttcttacaactgaacgatcatccatatcaagccttgctataagttcaccagcctgcaaaaggtgatacaattttattatctttttcaatttcaacaattgtacttactatgtggaatagaatgctatatacctgcattgcttgaccttcagacattttgaaatgaataatcccataaacatgcgaaagaagaggcatgcacattttcatgacctcaacttcatcatacggtgtgtcatcatcaacatgactgtcatctgcaaccaaatatttcataagcttgcat

SEQ ID NO: 16388 - DNA, 378 bp, Glycine max
tctatagaaggttcgttcctaatttctctactatttcatcacctctcaatgagctggtgaagaagaatgtggcatttacctgcggtgaaaaacaagatcaagcctttgctttgctcagagaaaagcttactaaggcacctgttctagctcttcctgacttttctaaaacttttgagctagaatgtgatgcctctggagtgggagttggagctgtattgttacaaggtgggcaccctattgcttattttagtgaaaaacttcatagtgccaccctcaactaccccacctatgataaagagctttatgccttaataagagcccttcatacttgggaacattaccttgttttcaaagaatttgtcattcatagagatcatc

SEQ ID NO: 16389 - DNA, 217 bp, Glycine max
ttctttcgttttcaattacttgtgtctcgatatcctacgggacacaatcggacatccgagtcaaaagttattatcgtttgacttttcttagagctcccgagttcaatttctagcgtctcgatatattaaagggctcaatcggacatccgagttaaaagttattgtcgttagacttttcttagagctttcgttgtcaatttcgagcgtcttgatatat

SEQ ID NO: 16390 - DNA, 390 bp, Glycine max
  unsure at all n locations
ntggagtttccaagtgccaattcgtcctcttctttagtccattcttcttctggcttcaattcatcagtgggctttccttctgtgtccagcatcttgggatgttcccagcctttgatgacagctttccaggttctgctatccagtgatttgaggaaggccaccattcttgctttccagtattcatagttgcttccatcaagaattggtggtctgttcactggtcctccttctttctccatgttcatcagaatttatctccccagatctcactctgtgatttcgagtgttggctctgataccaattgaaattctgataccagtggacagatgtcgtacaggatgtcacgacatcacgcttcaaacatgcagtttatgtgtgtccgtatgaac

SEQ ID NO: 16391 - DNA, 350 bp, Glycine max
atctttgatcggtaatttgcgaccagaggtcgttaagctcgtctctgctgatcttttcaaccttcagtctacgtctacgactcagcgcgtcaaatagttccagagcgaactccttagagtccttcatcccttcaaaaaattaaacaaagcatacaaaactcttcaaacaaggagtgaaaatgacaaaccgattaaatgcacatgcgaaacgcaagaatctgaactgaaatttgaaaaggaatcgtacctatgcattgcgcaaaatcagtgcgagaaagataaccgtccttggcaagactatagaaattgctgtgcacctcgttccacgcgttagcgccattggatttact

SEQ ID NO: 16392 - DNA, 409 bp, Glycine max
tcatatatatatatattaccttgcctacatccgttcttatactatgtaaaaatgatctatatatcaaattctatctatcctttcgtttgttatcaatcttatacacacaatgacatatcaaattataccatggtaattttgataattattatactatttttatatacgagggaagatcaaattataccagtataattttgataattattacactatttttatatacgagaataaatcaaatcataccgatataactttgataactattgcattatttttataacttgatatataatgtaatttttattgatataactgttaagttatattcacatattatcaagattgtccgtattatattttgtcaaaattgaacaacaagaaagtaatcacattatctatatgttaa

SEQ ID NO: 16393 - DNA, 314 bp, Glycine max
atcttgtcttttcccttgatatattagagggactcatgctcactatgaatgacaaatcacttgggataaaagtaatgttgccatgataccaaagcccgtactaaggcatacaacaccttatcataagtataatagttaagggtaggaccacttaacttttcactaatataagcaattggatgaccttcttgcatcacaacagccccaatcccaacatttgaagcatcacactcaatttcaaactatattgaaagttcggcaaagcaagtatgggggcattatctaactcttgcttataaacattgaaagcttct

SEQ ID NO: 16394 - DNA, 298 bp, Glycine max
tgggttaaaaaccacccctcaccctatgccttttattttgcaatggtcgaatgacaatggtgaattggttgtggataaacaagcatcacttacattcttcataggaaaatatgttgacgatgtgcttcgtgatatggttcccattgaagactaacatgtgttgcttgtacgaccttgtcattatgatagagatgctgttcacaatggggtcaccaatcaatattctgtcttccataaatgtaaaaaggttgttctctcacctttgcctccaatgaggtgtgtgaggatcatctaaccc

SEQ ID NO: 16395 - DNA, 335 bp, Glycine max
  unsure at all n locations
tttctntttctgaaagatagaaatttgaaatttgaaatttgaaagctgttatcgattaccacttgtatgtaaatgattaccagtaacggaactaaaaaaattcaaattgaaaaggcatgacttctcattacataactgtgtaatcgattaccaaagaagtgtaatcgattaccagtgaggaaattataaaagttactctgaaaagtcacatcccttcataagttttcgaaaaaccaccaagggcctattaatatgtgacttatctatgatagttttgagaagtttttcaaaaccttattgtcttatcctctcaaaaacaaatcattggccaaaca

SEQ ID NO: 16396 - DNA, 303 bp, Glycine max
  unsure at all n locations
tttcttccaagtanttaactgcttgctgggaactgtcctaagcaaagcccccaaagacctattaacaaacgaccgtttgcccatcggtatgagggtgaccactggttgaaaataacaatttagtgcccaacttgctccacaaagtcctccataaatggctgacgaacttagagtccctataactaacaatgctccttggcaaaccatggagtctcacaatctccgtgaaaacaaatcaggcacatgggaagccataataacttgtttacatggaataaaatgagccaattctaaaaacctatc

SEQ ID NO: 16397 - DNA, 367 bp, Glycine max
atcttgtaatcgattacacaagtcttgtgatcgattactagaggagattttcaaaaaataatttccaagagtcacatctgttcaaatggtttttgaatggccatcaaaggtctatttgtatgtgacttggaacacaaatctgcttagattttttcagaacaaaaaggtcttatcctctcaaaagcaaaattatcttatcctcttaaaaattccttggacaatacacttgcgattcaataaggaattattttgagttctccattgttcaatctatctctttcaagagagatttcttcttctcttcatcttatttctaaaaagggattaagagatcgaggatctcttattgtaaagcaatctgaacaca

SEQ ID NO: 16398 - DNA, 339 bp, Glycine max
ttctatccttgccccttgatatatgagagggagctttgtgaactatgaatgacccattccttgtgatataggaaatgtggccatgctcacaaagcccgaactaatgcgtacaacttcttatcataagttaaataggtgagggtgggaccactcaactctccactaaaatgagcaattggatgggctctctgcatcaacacaaccccaatcccgacatttgaagcatcgaactcgattacgaaaaatccttgaaagattcgcgacgcaagtatgggggcaataattaacatgttgcttaacaacattgaaagcttcttcctgtttatctccccatttgaa

SEQ ID NO: 16399 - DNA, 368 bp, Glycine max
tcatttcttaagaataatggcctcatcgaacgatttatttcctgaagggaattcaataaatatacctcctattttcaatggagtgggttaccattactggaaaacccgtatgcaaatttttatagatgcaatagatttaaatgtttgggatgcaatagaagtatggccctatattcccactatggtggctggaatttaaaccatagaaaagcctaaggaagaatggactgaagatgaaaagagattactgcaatacaacatagaagacacaaatataattacgtatgccttacgaatggatgagtactctaaggtatcaaattgtaaaagtgctaaagaaatgtgggataccctacaacgtacacatg

SEQ ID NO: 16400 - DNA, 402 bp, Glycine max
tgtgtgtccggtgtgcatgaagtcatggactctattatcaatggtgtttaacctggttaatatgaatgccaaatatggatggagtgacaaaagcttcactatattgcttaatgtaatgcaacgtatgcttccagaataaaacagatcgccaaatagttactatggggcaaagaagatactgtgtccgatgagtatggagtattagaaaattcatgcatgccttaatgattgcatgctgtacaaagatgagtttgaagatatgcataaatgccctatgtgtgctgtatcacagtacaaagtgatagatgatacaaatatagcagtgatgaaagcatatacgaagacccccctatgaagatgtgatggtatcttcctatcattccaaggtgtaagcatctattt

SEQ ID NO: 16401 - DNA, 377 bp, Glycine max
tcattcttgttcactaaagaaaaagtatcagagaaatcgattccatcttgatgagtatatcctttggcaaccaatgagctatgtatctatccacagagccatccattttatatttaaccttatacatccagctacaacctatacaatgcttatcaggtggtaagggaacaagtgtccaggtggaatttgcctcaagagctttgatttcctcattcattgcctgacgccactcaggatagggggcagcttgatgataaaattgaggttcatatacaactaaaatctggttaatgagagctctgtaaggggagctaagagccaataatgaacaatgatgctggatcggatatgcaatcttagatattggtgtaacatag

SEQ ID NO: 16402 - DNA, 380 bp, Glycine max
tgtgcattcaatatcctaatgagggtgttccatatgttctcaagactggactaatacatttgctgcccaagtttcacggtcttgtaggtgaagatcctcataagcatcttaaggagttccttattatctgttccaccatgaagccccctgatgtccaggaagatcatatctttctaaaagattttcctcattctctggagggagtggcaaaagattggttgtactacctttctcccagatccatctccaactgggatgaccttaagagggtgttcttggagaaattcttccctacatctaggaccacgaccatcagaaaaaacatttcaggcatcatgcaacttattggagagagcttgtatgagtactgtgaaagattc

SEQ ID NO: 16403 - DNA, 393 bp, Glycine max
tcttatccaaggcaattcttggtggtgaagctccttcttccttggcttattccctagtggatggtgcctcccctctcctcttctcctttgccttccgctgcatctccatggtgaaaaatcaccattgaaggacctcattggagctcaaagatccagcctccatagaatcttcacaagcaagcttccatcacctcttttcctgtacatgactgtgttagacgagtctatgggatgcgtgttgggtcaacatgatgactctgggaaaaaggaacaagccatttactacctaagcaagaagtttaccgcatgtgagatgaattacacaatgctggaaaggacgtgctgcgccctgttatatgcgtcacatcgtcttatgcagtacatgctcagtca

SEQ ID NO: 16404 - DNA, 399 bp, Glycine max
  unsure at all n locations
ntaactaatatctttttctaaagctcccatttatctttatcagtatttgattccaagtgagctatttgtgaataactttttcaaatcatataatataaccttcagtatccatatccgtgcatgtctttcggaaaagagaaataatatgcgcgcggacacattcatatatgaataaatcgtcaactttgtccccgtgtgaaatatcgacgaattagttctaaattttaaatttaattattaaatatgaaaaatgtaataaattaattatacaggtcatttaatgataaattaatctggttaaattaatcttaaaaaatattacttattctcaaattggtctttaaatattataacaaaataataaaattatctaacaaaattaacaataaaattaatttt

SEQ ID NO: 16405 - DNA, 375 bp, Glycine max
ttctttcttgtactgatcaagacagttggaatgacgaaagctagttccacacatatagggacggcaacccttgtcatgagaagaacaaagaagaagaacagcattgtgtggatattccatgcacacagaacatgtaacatcttcccactctttcttttccaaagccttagaacatttgttttggcagaggtcctcacaaatgtcccttttgcaagaagccagtgggtatggagtcactctgaattgacgagaagcaatcctgtgtcttcccctgctaccttttgccatttccgatattccaacagaatctggaatttaaactgtcaaaatgttatcaaggaatctaaatgaaatgcattcatatattttttatgt

SEQ ID NO: 16406 - DNA, 377 bp, Glycine max
agcttggagaagggaaaccagaaaatcagaatcatgccataatctttacacggggtgatgcagttcagaccattgatatgaatcaagacaattattttgaggaggctctcaaaatgcggaatctgttggaggagttcaatatgtcctacggtattaagaaaccaaccattttgggggtccgagaaaatatcttcacgggatctgtttcctcacttgcatggttcatgtcagctcaagagacaagttttgtgacactgggtcagcgagttctggcaaaccctttgaaagtacgaatgcactatggtcatccggacgtgtttgacagattctggttcttgggtcggggtggagtcagcaaggcctctagagtgattaat

SEQ ID NO: 16407 - DNA, 377 bp, Glycine max
agcttatgctacaaacatttataatagaccccctcaacaacaaaaccaacaacaacagaataattatgatctttcaagcaatagatacaatccaggttggagaaatcatccaaatctgagatgggcaagtcctccacaactacaacatcctgcccctcctttccaaaatgttgttggtccaagcaagccatatgttcctcctccaatacagcaacaacaacaacagtagcagcagtcacaacaaagacaacaagcaacgaggctcctcctcaaccttccttataagagttagtgaggcaaatgaccatccagaatatgcaattttatcaagagacaagatcctccattcagagtttgacaaatcagatggggcagat

SEQ ID NO: 16408 - DNA, 431 bp, Glycine max
gtggagtttccaagtgccaattcgtcctcttcttttttctattcttcttctggcttcaattcatcagtgggctttccttctgtgtccagcatcttgggatgttcctagcctttgatgacagctttccaggttctgctatccagtgatttgaggaaggccaccattcttgctttccaatattcatagttgcttccatcaagaattggtggtctgttcactggtccgtcttctttctccatgttcatcagaatttatctccctagatctcactctgtgatttcgagtgttggctctgataccaattgaaattctgataccaggggacagatgtcgtaccggatgtcacgacatcacgcttcataacatgcatattgtatgtgtccgtatgaacagattgaacaagtttataacacaacgagaattgtttaccc

SEQ ID NO: 16409 - DNA, 374 bp, Glycine max
ttgtcttcagaattcaatttctagcgtctcaatagattacgggactcaatcagacatccgagcaaaacgttattgtcgtttggattagttcagagcttcagaattcaatttcgatcgtctcgatatattacgggtctcaatcaaacatctgaggaaaaaagttattgtcgtttgaatttgctgagagcttcaacattcaattttgagcgtctcgatgtattacgggactttatcagacatccgagttaaaagttattggtggttgaatttactgagagcttcaacattcaatttcgagcgtctcgatattttacgggactcaatcagacatccgagtgaaaagttattgtccgttgaattagctcagagattca

SEQ ID NO: 16410 - DNA, 425 bp, Glycine max
tcagcttgagctattcaacgacaatacgtttgctctgtgtatgattgagtcccgtaatgtgttgagacgcttgaaattgaattttgaagctgagagctaattcaaacgacaataactttttactcggatgtctgattgagtcccgtaatacatcgagacgctcgaaattgaatgttgaagctctcagcaaattcaaacgacaataacttttttcctcagatgtctgattgagacccgtaatatatcgagatgatcgaaattgaattctgaagctctgagctaattcaaacgacaataatgatttgctcggatgtctgattgagtcccgtaatacatcgagacgctcgaaattgaatgtcgaagctctcagcaaattcaaacgacaataactttttgctcggatgtctgattgaggctcgtaatct

SEQ ID NO: 16411 - DNA, 376 bp, Glycine max
ttgttagaacctataagttcaagagccaaaggaatgccggaagcaaaagtgattgcacggtttaatttattaatgaaatctggatgaactctgtcggttctgaaggccttccaacaaagcaattcgagagcttcaccattggccaaaacttccacctcgtataccttgtcaaccccatgggctttaagcaaatgtctgtctctagtggtaatgatgactctgctgccagggccaaaccaatcaagacttccaacaagagctcgcaagtcatctatctcacagacatcgtcaagaaccaaaagaagcctcttcctggggagcatcttctttattagtgaaactccttgctcgacacttgtcagacgaatattgttct

SEQ ID NO: 16412 - DNA, 325 bp, Glycine max
tgctttgaatgctctattcaatggagttgacaagaatatcttcagactgatcaacacatgcacaatggccaaggatgcatgggagatcctgaaaaccactcatgaaggaacctccaaagtgaagatgtccatattgcagctattggccacataattccaaaatctgaagatgaaggacgaagagtgtattcatgacttccacatgaacattcttgaaattgccaatgcttgcactgccttgggagaaaggatgacatatgaatagctggcgagaaagatcctcagatgcttgcctaagagatttgacatgaaagtcactgcaatc

SEQ ID NO: 16413 - DNA, 416 bp, Glycine max
gtaaaagattggctaagattttgttaaaacataagcacttagacaatgaaggaaagctggagttgctgcacaagatgtccaacgttatgtctaagaataagatcgggctgcacaatgcacaaggcaagataaagtgtcaaatgaagaattgaagctgcaggattcacgatgtctgatacaatgtccaggacatcctgcctgaaaatactggaattgctaaaagcattgaagctgcaggatccacgatgtcagatacaatgtccaggacatcttgcccgaaaatactggagttgctaaaagcattgaagttgcaggatccacgatgtcggatacgatgtccattacatcttgcccgaaaatactgtacatataaatctgttatatctttaacagattattgtgcagttagcaagaga

SEQ ID NO: 16414 - DNA, 430 bp, Glycine max
ctttcctttggttgttctattagggtttccaagcgttagagagaatgagaatagattgtagtcttaatatcactgtcttcgtgcgaggggaatttctctctctacagacattattttgcaaatcccaacagtgagaatctgcgaaaatgagtttcgaaggtggtacccaaattttaggacaatctaacggttaatgagtttgagatcgtaattttactgggataaatttgggtgtatgcgagaaaaagggagggttttgggagaggatagagagaatgaatttgggaggaaggaggagtgtaaagacatatcgtaattgtaaaaattgacctaatctgtctctatttatagctagggtattctgagacgattatttttttttttttttataaaaatgaactctattttactctttcataaaataaataac

SEQ ID NO: 16415 - DNA, 380 bp, Glycine max
  unsure at all n locations
tttctttaagttgngataattctgagaagtggttaaatgccatgaaagaagagataaattccatggaacataatggtgtttaggaccttgtagaattaccaaagggttgtaagagagttggttgtaagtgggtcttcaagactaaacgtaactctcatggcaaccttgaacattacaaggctagacttgttgctaagggatttactcagaaagatgacattgattataaagagaccttttcaccggcctcacaaaaggattctttcatgattatcatggcattaatagcccattatgacttggagctacatcagatggatgtgaaaactgcctttcttaatggagatttaaagaatgtttgtatggaccaaccaatgggg

SEQ ID NO: 16416 - DNA, 426 bp, Glycine max
  unsure at all n locations
cctatggactgagcaaaaaggctcaagtcatcaaatactactcatcttttaaagcacaaagcgaggattggaacctcaaccctatgttcttttaaaagactgcaatgagaaaattacagaggataggaatccctgggggaaaccaagaagaatacacaaaaataaaaacatgcagcgacttccttaattgccccaaatcttaagcgtagtatcgcttgacaacgtcggagttcacgggtgaagatagctcctcgttatccatgttggcgagcaccagggcccctctagagaaatccctttttacaatgaaaggaccttcgtagttcggggcccactttcccatatgtcttccagagcttgggagactttcttcagcaccaagtccccttcgctaaacctgcgcangcgtaccttcttgtcagaagc

SEQ ID NO: 16417 - DNA, 383 bp, Glycine max
agctttggtcctattcaaatagccataacttttgacatgggggtacgattgaggcccatgatatatcgagaggctcgaaattgaaaaatggaagttctcgagaaattcaaatggtcataacttttaacttggatgtccgattcacgcacataatatatcgagacacacaaaattgaaaaatggaattctcgagaaattcaaatgttcataacttttgcctcgaatgtcagatttaggcacataatatatcgagacgctcgaaattaaacaagaaagctctggtccaattcaaacggccataacttttgacatgagtgtatgattgaggcccatgatatatagagacgctcgaaattgaataatggaagttctcgagaaattaa

SEQ ID NO: 16418 - DNA, 414 bp, Glycine max
agcttcaaccaggggagatggaccatttcaagtgcttgaaagaatctttgacaatgcttacaaagttgagctgcccggtgagtataatgttagttccaccttcaatgtctctgatttacctgtttttgatgcacatggagaattcgatttgaggacaaatccttctcatgagggagagaatgatgaggacatgaccaacagcaagggcaaggatccacttgaaggacttggaggacctatgacaagggctagagcaaggaaagccaaggaagctcttcaacaagtgctgtccatactatttgaatacaagcccaagtttcaaggagaaaagtccaaggttgtgagttgtatcatggcccaaatggaggaggactaaatgacaccactttggttcaattttagagtgtttactta

SEQ ID NO: 16419 - DNA, 425 bp, Glycine max
tatgctgcaaacatctacaatagacctcctcatcctttcagcaaaatcaaccacagtagaataattatgacctctccagcaacagatacaatcccagatggaggaatcacctgttagacaaatggcctaagttatcttaagaagggggggttgaattaagataacaagaactattccccaattaaaattttactctctctttttagattaacaatgcacccttaacatgaattactcaaaagacaattcaaaataaacttctttcaagccaaagataaatagcaataaataaaagaagtttaagggaagagagaaatgcaaacttgatttataccagttcggtcacttcctgtgcctacgtccagtcctcaagcaacccacttgagattttccactctctttgtaaaatccttttacaaagtctg

SEQ ID NO: 16420 - DNA, 429 bp, Glycine max
taacaatccttgtgatctattacaggatatttctattcctatcacatagcttgcatcactcatatccttcatttcaaagttactagaaagaaacttcttagtctcatgaagaagaccaagatcattagttgcaacaatatatcatcaacctacaggattagaaaataaccttactcccactgaccttcagatatatacaccgatcaacagtattttccttaaatccaaaggaaacaatggtatcattaaacttcaaataccattggcgagaagcttgcttaaaaccatatattgatttctttaatttgcacaccatatgttcctttccctcaactgagaaccccattggttgatccatataaacattctcctctaaatctccattaagaaaggcaattttcacatccatctgatgtagctccaagtcat

SEQ ID NO: 16421 - DNA, 453 bp, Glycine max
taggacacttaaatctcagcttccatatatctctcccaagagaagcgggcatgtaacttatggtgacaacaacaaaggtagaaagaattcttggagttggaaaaacaggtacaaattattcaaactccattgaaaatgttctacttgttgaaggccttaagcacaacttgcttagtgttagtcaattatgtgataaaggctatctagtatcatttgattctcaaaaatgtctcattgaacataaacatgatactaatataaaacatatagggtatagagtcaacaatgtttatatgatagacataagccaaaaattagataataataaattttttcttagcaaagatgatgatccatggctatggcataaacgtattgctcacataaacatgaaacacttaaataaattaatttcaaaagatttagttgttggtttgcctaaattgaaatttg

SEQ ID NO: 16422 - DNA, 381 bp, Glycine max
agcttgaaggcaaactggatgcgttggtcaacttggtaacccaactggccttgaatcagaaatctgtacctgtcgcaagggtttgtggtttgtgctcctctgctgaccaccatacagacctttgcccttccatgcagcaacctggagcaattgagcagcctgaaacttatgctgcaaatatttacaatagacctcctcaacctcagcagcaaaatcaaccacaggagagcaattatgacctttccagcaacagatacaaccctggatggaggaatcaccctagccttagatggtccagccctcagcaacaacaacagcagcctgctccttccttccaaaatgctgctggcccaagcagaccatacattcctccaccaatcc

SEQ ID NO: 16423 - DNA, 423 bp, Glycine max
atggccccctgcattcagaacaaaacccctaccatggatgcagagacgggaagcaaactcttgaggatcaatcctcatcctcgtaaatctggaataggtaggcagtgtctcaccctcctctaaaactattggggtttcaaagaaggtatttaggctgtcagcatcaatcttgattaagtgtcctgatgcaatcctaccccgcaagggcattggatagaaaactccaagtagattgggccaaagatgcaagagaaggccctagggttcttatgagccttaaggtagatttcgggcccatgggctaagtatgagcccacttatctttgtaaatattagattaaggtttcattatttttgggccttgtatttagggctccataatgtaagtagggtaccctagaaatataggatgtttcagccctt

SEQ ID NO: 16424 - DNA, 380 bp, Glycine max
agcttgtatcaaattcaaacgacaataacgttttactcggatgtttgattgcgtctcgtaatatatcgagacgctcgaaattgaaaacggatgctcgtagcaaatgcaaaccgcaataacttttaactcggatgtatgattgagtaccataatagatcgagacgctcgaaattgaaaaaagaagttctgagcaaattcaaacgactataactttttactcggatgtctgattgagtcccgtaatatattgaggagcacgaaattgagaacagaagctctgaccataatcaaaccaaaataactttatattcggatttgcgattgagtcccgtaatatatgaagacgctccaaattgaaaacagaagctctgaacaaattc

SEQ ID NO: 16425 - DNA, 430 bp, Glycine max
  unsure at all n locations
cttgagccaattcaaacgacaataactgtntactcgaatgtctgattgagtcccataatatatcgagacggtcgaaattgaatgttgaatctctgagcaaattcaaacgacaatagctttttactcggacgtctgattgagtcccgtaacatatcgagacgctcgaaattgaatgttgaacctccgagacaattcaaacgacaataactttttacgcggatgtctgattgattcccgtaatatatcgagaccctcgaaattgaatgttgaagccctgagccaattcaaacgacaataaatttttactcggatgtctgattgagtccccgtaatatagcgagacgctcaaaatggaatgttgaacctttgagccaattcaaacgacaataaccgttttactcggatgtctgatggagtcccgtactatatc

SEQ ID NO: 16426 - DNA, 352 bp, Glycine max
agcttattctgcaaacattactaatacacctcctctacagcaaaaccaataattgcataataattatgacctttcaagcaatagatacaatccaggttggaggaatcatccaaatctgagatggacaagtcctccacaacaacaacagattgtgcctcttttttagaatgctgtctagacaagcatgccatatgttgctcctccactacagcagcagtcacatcaaagacaacaagcaactgaggctcctcctcaacctttcttagaagagttagtgaggcaaatgaccatacagaatatgcagtttcagcaagagacaagagtcttcattcagagtctgacgaatcacatg

SEQ ID NO: 16427 - DNA, 424 bp, Glycine max
tgaccctgttgtaagagggtaaaaagtgaaagttaatctgttgcaccaacaaagttcttcaaggaccagaaaaaaggtaccatatgattgaaatcttgctgtagcattgatcaactcatctagaacgtttagaccgtatttccaaaaccattatattaaagtgataattgatcatcccattcaacgagtaaagagaaaatctaagcttacaagtacaatggtagcgtggatagtcgaactttttgagttcggtttgaaatttgagccaagaggtgccatcaaagggtagtacttggtcgacttcatggacgagctacttcccaatgaaggctacaacgaacgttagtggacattatacattgatggaacttctaacaacaatagtactggtgttggggttactctgataggaccagatgccatc

SEQ ID NO: 16428 - DNA, 369 bp, Glycine max
tgcttgtgtctacaccgctttgcactggataactttttctttaattattttttttatatagaagtgtttaactggaattagaatatttgatgtataatgtttggattttctttgtataagtattgagaactctgtttggttatgattatcaggcaagcaaaggatgttgttaaaggtataaagaagcggattggaagtaaaaattcaaaagttcaacttcttgcactaactgtaagcaagagtgttgtaatacaaccttttttctcttaaactctgttgatggcattgatctaaattctttttgtatctaagcatgtttgcttcaattgcaccattttgaccttctaaactttacattcttgactgatt

SEQ ID NO: 16429 - DNA, 374 bp, Glycine max
agcttgagtcctttaagcttagaaactatatgagacatttccatgatgtactctctaatttttttcccgttatactttatggaaatcaagtggtgtagcaatgtacttgtttttgccttatcgcttttttcaaagcatttctctagtttatcaaggaaatccttagcattggtgatcccttcggtcattgcaccccttaaggattttggaatgccacactacaatcttggtttttatattttgttgaacaaatggtctcagttatcttaagaagggggggttgaattaagataacaagaattattccccaattaaaatttcactctctctttttggattaacaatgcaccttcaacatgaattactcataagac

SEQ ID NO: 16430 - DNA, 433 bp, Glycine max
cagcttgccaccataggaagccatggataagagcttgatggtatgagaagatgaattgagggagaggggaagaaggagcacgaaattttgtgcctcaaaagaggtttgaactttgaattttaattttcaaatgattaaagttcaaaaaaaggtacacacatgacctctatttatagcctaagtgtcacacaaaattcgagggatatttgaattttacttggatttgaaattaaatttgttgagccaaattttggaaccaaaatttcactaattatgattagtgaattttagttatggttcagtccactaatccaagatcaagtccaagattttccactaagtgtgcttaggtgtcatgaggcatgtaaagcatgaaggacatgcacatagtgtgactatatgatgtggcaatggggtgtagcaagcaaatgtt

SEQ ID NO: 16431 - DNA, 414 bp, Glycine max
tctagatctatttcattccagtgtgaattcaccgatggtcttacatgcctatcaatttttatttggttagtcttcgaaccacatcatactttgagagaggtatgctctgatacccacaaacctactcacacataatgtctggttgcttttaggattgttggttgttcccataaattaatataagactttttggtatgttttgtccacacttactaaaaaaacttctcagaaggtcacccatcccataattactttaagctaaccatgtttgactatagagttcttaagtgatggattaccgaaaaatatattcatctcgttagtataggtaatactaattaatttctaagttatcctcaattgtgcagtttcatacttacaccatctttagatctctcttattctgaggtgcat

SEQ ID NO: 16432 - DNA, 375 bp, Glycine max
tagctttatgcatatggaatcaaaatataacaaatgacatgtatctcatgtcaaaaaattttttacacttcttcttaagaatttcctattgacaatttaaggtaatattatccattacgaaattctccattgagtcagttcaatggtcacattcatatgcacataatttatatatgtaaattaataaatgagatctattaatgttcattcaatgaatactatcacatatgtcaatctatccaaattattaatgtcatattcataataatcttaggatcaagaacaattaaaattaaaattatgagagacttttttctcattttcataatctctattatgataacaaatctttaattttaatcaaggaccttatca

SEQ ID NO: 16433 - DNA, 380 bp, Glycine max
agcttttcttttagcaaagcaaaggcttgctcttgtttttcaccccaggtaaatgccacattcttcttcactagctcattgagaggtgatgcaattgtagagaaattaggaacgaaccttctatagaagcttgccaacccatggaagctcctaatatctctcacactttttagggtgggccattcttggatggccttgattttctcagggtccacttggaccccatttctaccaactacaaaccctaagaaaaatatattatctacacaaaaagtacacttctctatatttgcatatagggtatttttcctaaggactgaaagaacttgcctgagatgtcctaagtgatcatctaggctcctactatacactaaaatatc

SEQ ID NO: 16434 - DNA, 383 bp, Glycine max
agcttatgctgcaaatatttacaatagacctcctcaacctcagcagcaaaatcaaccacagcagaacaattatgacctttccagcaacagatacaaccctggatggaggaatcaccctaacctcagatggtctagccctcagcaacaacagcagcctgctccttccttccaaaatgctgctggcccaagcagaccatacattcctccaccaatccaacaacagcaacaaccccagaaacagccaacagttgaggcccctccacaaccttccctcgaagaacttgtgaggcaaatgactatgcagaacatgcagtttcagcaagagaccagagcctccattcagagcttaaccaatcagatgggacaattggctacccaattga

SEQ ID NO: 16435 - DNA, 429 bp, Glycine max
  unsure at all n locations
ntgaatgctctattcaatggagtggacaagaatatcttcagactgatcaacacatgtacagtggccaaggatgcttgggagatcctaaaaatcactcatgaaggaacctccaaagtgaagatgtccagattgcaactattggccacaaaattcgaaaatctgaagatgaaggaggaagaatgcattcatgacttccacatgaacattcttgaaattgccaatgcttgcactgccttgggagagaagatgacagatgaaaagctggtgagaaagatcctcagatccttgcctaagagatttgacatgaaagtcactgcaatagaggaggcccaagacatttgcaacatgagagtggatgaactcattggttcccttcaaacctttgagctatgactctcggatagggctganaagaagagcatgaatctg

SEQ ID NO: 16436 - DNA, 376 bp, Glycine max
ttgtctttcaagtttttaagttcttcctcagaactgtcctaagcaaagttcccaaagtcctattaacaacttccgtttgcccatctgtttgtgggtgacaagtggttgaaaataacaatttagtgcccaacttgctccacaaagtcctccaaaaatggcttatgaacttatagtccctatcactaacaatgctccttggcaaaacatggagtctcacaatctccttgaaaaacaaatcagccacatgggaagcatcattaacttttttacatggaataaaatgagccattttatgaaacctatcaacaaccacaaaaatggaatctctaccattgcttgtttttggcagccccataacaaaatccatggattaatc

SEQ ID NO: 16437 - DNA, 417 bp, Glycine max
gtgagcaaattcaaacgacaataacttttaactcggatgtccgaataagtcccgtaatatatcgagacgctcgtaattgaaaactgaagctctgagcaaattcaaacgacattaacatttgactcggatgtccgattgcgtcccgtaggatatcgagacgctccaaattcaaaacggaagctttgagaaaaatctaacgataataacttttaactcggatgtctgatcgagccctgtaatatatcaagatgctcgaaattgaaaacggaggctctaagaaaagtcaaacgacaataacttttgacttggatgtccgattgtgtcccgtaggatatcgagatgctcgtaattgaaaacggaagctcggagaataatcaaacgacaataactcgaaattctgataccaggggacagatg

SEQ ID NO: 16438 - DNA, 398 bp, Glycine max
atagctctagaggcgagctgccggctttctctcttgaaattgaacaacaaaagctgtcgagatattcaaaatggtcataacttttaactcggaggtccgattcaggcgcatcacatatatatacgctcgagattgaacaacataatctctcgacatatacatatagtggtaacttttaactcggaggtcctatttatgcacatcatatgtcgagacactcgaaatcgaacaatggaatctcttgagctattcaaatggtcttaacttttgactcagaggtccgatgcaagcgtgtaatatatcgagacgctcggaattgcgcaaccgaagctactgtgaattgaaaatggccgttacttttcacttggaggtccgatatacgcgcatacatatttaga

SEQ ID NO: 16439 - DNA, 378 bp, Glycine max
agtcacacaagttacccaggactacgtaggtctgaattcctcatttgaggatacataggagcaagagcctcgcttttgtcggccgccccacaatttctgtcatactgacactggagtcacgtgacatgcggagatacccaagtggttgtccgcactttcataaacattcttttgctatctgtaggacagaaagcctgatagcatgcagagactaacatcgtcttctgcacccttcgtcaatcgcggcccaacaagcccgttgacatgcggagatttacgtcatcttccgcgctcacaagatctgtcatactgacatttgagtcacgctgacggacggaaatacccgagtggttatccgtctaaacattcttttgctat

SEQ ID NO: 16440 - DNA, 382 bp, Glycine max
agcttgacgtttatctcaaaattgcaaagacatgaccttgtgagaggtttaccaaggatgtcatacaaagatgaaacaaattaaaacctctttttcaagcaaaaactttgtttcctcaagaccacttgaactattacatattgatctgtttggctacaatgaatgactacattagatggacatgggtaatgttccttgctcataagaatgagtcctttgaggtattctttaaattttataaaagagcttaaaatgaaaaaaaagtatgcgttacttcaattagaagtgatcatggtggagagtttgaaaatgagaactttcgtctattctatgaagaaaatggaacttttcataatttcttcatgtcataccctaatttcat

SEQ ID NO: 16441 - DNA, 427 bp, Glycine max
  unsure at all n locations
ntgtatggtagaaggtgtaggacacccctatgttggttatagcccggagaaggcctcaccttatgaccagaagtggtacagcaaaccactgagaaagttaagttaattcaggaaaggatgaaaactgttcagagtagccagaaaagttatcatgataagaagaggaaagatctggaattcaaggttggtgatcatgtattcttgaaagtcactccgtggactggggttggtcgagcattgaaatctcgaaaactcacacctcgcttaattggtcctttccaaattcttaagagagttggccctgtggcataccaaattgcattacccctgtctctttctaatcttcacaatgtctttcatatgtctcaactccataagtatatctgtgatccatcccatgtgattgaattggatgatgtacaagtga

SEQ ID NO: 16442 - DNA, 376 bp, Glycine max
tgcttctaaactttgtacaagaatgaagctctgataccacttgttagacaagtggcctcagatatcttaagaagggggggttgaattaagatattccaaactttttttccctaattaaaaatctatcttactttttacttaagttatgaattcccttaatgacaatcttcttaaatattaattcaaatgaagcaacttgaatatgaatataaagcaataataaataaaggagattaagggaagagaaaatgcaaactcagttttatactggttcggccacacccttgtgcctacgtccagtccccaagcaacccgcttgagagttccactaacttgtaaattccttttacaagttctaaacacacaaggacaaccc

SEQ ID NO: 16443 - DNA, 431 bp, Glycine max
tatgagcatgaaacctttctccaccaaccgagatagtaacatctaatgattcctcatcctctaacaacatcccaaaatgttcaccaatatcagattcaggaacctgtattgtgtttaactgagaagaatctatggacgacactaaaaccgcaatagtgcaatttatcttcaagcagtcatccttgagaaaatttgacgtctcaaggtgtctccgtttgaaaaaccgcgtatagcccctattacgcaacaagtgcatcattgatcactatatacgtaatgtacaccacaaaaaatggatacaagagctaataaatcatgatgatatccaaatcatatcaccaaaatcacaaggttctctagttcctttggaaatttaatttttatgtcttatattctaataaaagagctatctctttaacccctgacaatag

SEQ ID NO: 16444 - DNA, 417 bp, Glycine max
ctgaatggaggctctgatctcttgttgaaactgcttagtcattgtcctcacaagttcttcaagggaaggttgtggaggggcctcaactgtttgatgtttctggggctgttgatgttgttgctgtcggattgctggaggaacgtatggtctgctcgggctatcagcattttgacaataagtctgctgttgatgctgctgctgctgtgaaggatccgaccatctaaggttgggatgattcctccatccgggattgtacctgttgctggagaggtcataattattctgttgtggtctgtgtggttgccagcataggagcataaaccacagagtctggcgacaggcgcagattattgattcatggccatttgggttaccaggttaaccaaggcatctagtttaccttcaagcttcttagtc

SEQ ID NO: 16445 - DNA, 360 bp, Glycine max
acacataaacatgtatagaaagttaaataaattaagaagtaataggtcaaataataaattgaaattgagacgaaaattaagtatcatttcagaattcaacacataaaatacttttatatgcactctttagtttaattatttattaacccttttaaattgaaaataatagtaggttaattgtaatattatacaacattattgtgtcaatgtaaatattaatattgggggaagtgtatatgattcatgaggtgtgataacatgttgcgctaagattataacactgtgattgagaatgagtgaatgtgataaacgaataatgtttgaatcggaagatatatgtgtactgagattttatatgca

SEQ ID NO: 16446 - DNA, 412 bp, Glycine max
  unsure at all n locations
tctctcagcaactntgactgcaaaacttcacaggtgctacatggcttctttgcaagtgacaagacaagctttggcatctgagtctcagagaacaccaccctcagtgcaaaatgcaacaacctccacaaccacaccaattagcaacaacttcagtgtgaagagtgagcaaactcatgcagtgttgccacataagagaccagaggaggagcaagagtcagaggcaaatacgggtgtgaaaagggttaaggctgtggaaaatgttcctctgcaattcaagcctcttgaggaagatcacatagagcaaatgattgaggagcttcttgattatggatctattgaactctgctctgtcatttcaccccangccctctaattgaatgtgcatgtttttgagctgaatctaaagtcacaa

SEQ ID NO: 16447 - DNA, 340 bp, Glycine max
ttcatgctattctgtacggttaaagtctcacgattgtcacatgtcgatgcaacaatggttattcgtggctatacaagacatcttgccaaacaaagtcaagttagccataactcgcctgtgcttcttcttccatgccatatgtagcaaagtcgttgatcctgtcaagcctgatgaattggaaaatgataccgcaattatactatgccatgtggagatgtattttccccctgctttctttgacatcatgattcacttgattgtgcatttggtcatagaaatcaaatgttgaggtcctgttcatttgcggaggatgtacccggttgagcgatacttgaagatc

SEQ ID NO: 16448 - DNA, 413 bp, Glycine max
tcgcacttgataatggatacacatgaacagcgctaatcaatgacattcatggtgctccgaataaaggtggagtatggaggattgccttgagggtcctctcttatgcaatcatggaacacagctccaaactcgaaagtggaggacacatgaacaaccctaagcaataacattcatgtggctctggaacacgatgagaatggaagattgccttgacggtcctctcttaggcaatcatggaacacagctccaaactcgaaagtggaggacacatgaacagccctaagcaataacattcatgtggctccggaaccggatgagaatggaagattgccttcagggtcctctcttacgcaatcatggaacacagctccaaactcgaaagtggaggacacatgaatgacaacgcaattcaa

SEQ ID NO: 16449 - DNA, 412 bp, Glycine max
tgaaggtaggagaagatgagtgaaaggagagggatagaaggagcacgaaattttgtgcctcaaatgaggtttgaactttgaagtgtaattctcaaatgaccaaagttgaaaaatgcacacacatggcctctatttatagcctaagggtcacacaaaattggagggaaatttgaatttctattcaaatttcacttgaatttgaaattgaatttgtggagccaaatttaggagccaaaatttcactaattatgattagtgaattttagctatggttcagcccactaatccaagatcaagttcaaaattctctactaagtgtgcttaggtgtcatgaggcatgtaaaacatgaaggacatgcacaaagtgtgattatatgatgtgacaatgaggtgtaacaagcaaatgctcacc

SEQ ID NO: 16450 - DNA, 435 bp, Glycine max
ttggttgtcatgatgaattagattcattgcatagtaatgataacagaaactttattgtcatacaagactttcttagtacattagaagaaattcctagttccttgagcatccattgcaacaaaatccttcatatataccattggccaaagccctaaattctgcttcagcaatgcttctagctaccacaatctgcttcttgcttctccaagtaaccaagtttcccctcacgtgatataatatggatgaaacaccaagatacacaagtaaacagatgaaaaataaatccaaatgtgcagctagacaacttgcatgtgactactattactaatttactatgcacatatgtaaagatatattcattattcaacataaacatatccccccaccccccccaccccagaagaaaatgtactacaagggaaaggtataccatta

SEQ ID NO: 16451 - DNA, 415 bp, Glycine max
  unsure at all n locations
ntgcgattcgggccagacgccagtgtcgaggacatcgatgacgacgtcgtgtgaggcctggtggaggtcttgccagaaggcggaatgggcctggaggcccaggaactcgggggtgcgagtggtgtgaagcgtgtagcgcgtgtcttcgtagacggccaagacggaatgggaagctcgaagcgcgtgggcttgttgagggtcgagagtggcagcgaagccgttgtaagcggcggtgtaggcatagaggagagagtctggagaagaatcgagtgtggcagtgtaccagtcacggtgcgtggggtgcacggtggaatcgtggcggtgtttcatgtgtactatgtaagtcttcttggtcgcagatagtagtgtgagttggaggagaaagaatgagaagaaggaaagggaaattgatgac

SEQ ID NO: 16452 - DNA, 435 bp, Glycine max
taatactcataatcacatctataggactaaggtcctttatattttaattactagataagaaagacttcacatcatttatgaaatgcataccactaccaaatatcaatatgtcatccacattcacacatttatcattattattgatttgaaaaccatacaaaagaacaacttgatcaaacttttcgtgtcattactttggagcttgtttcaaatcatataaagatttaccaagaatctataagtagtactatgcaaagaatatccaacaaaaacataatcaacagtctttggtccaattttccttttcttattaatagggatgttaacctttgctagacacccacacactttaagatattttagatttgattatctttttctccatagctcaaaaggggtattttttaaaaaataattataaggtaccatattaaa

SEQ ID NO: 16453 - DNA, 381 bp, Glycine max
  unsure at all n locations
tgcttcgaaacctcacgggattaaaaagttgaaaatttcatatgatgatgctttgctaaggctggaaagaattccagatgttattggcatcaatgatgctccaagtgttggtgaagataatcctgaagtttggcatgttcaggtaattagttatctaataatgctgaataaatattttgattttctagaagcaattattttctcatttactctaaaatgaaattatcgattatgtctactttggaatgtagatatttcgttcaattgattcaaattccgttaaggggtttccaaaggatccaaaagatgcaacgagcaaggtgaatgaaaagccttgtgtttcaattnttgtttgtcagacttggtttaacctatcaaacc

SEQ ID NO: 16454 - DNA, 407 bp, Glycine max
aacttatcacactgagctccgattcagtcttacaatatattgagaccctcgaaattaaacatcggaagctctcgagaaattcaaatggtcataacgtttcacacgaaggtcagattcaggcacataatatgtcgagatgctcggaattcaaccacggaagctctcaagaaattcaaatggtcataacttttcacacggatgttcgattcgggcatataatatgtcgcgatgctcggaattgaaccacgaaagctctcgagaaattcaaatggtcataacttttcacacggatgtccgattcgggcgcataatatgtcgagatactcgacatagaacaacgaaagctctcgagaaattcaaatgggcataacatttcacacggatgtcagattcggcacataatatgt

SEQ ID NO: 16455 - DNA, 348 bp, Glycine max
  unsure at all n locations
aacatctccagtgttaattttgcccgaccctaagagaccatttgaagtgtattgtgatgcaagcgggcaaggcttggggtgtgtgttaatgcaagagggaagaatagtggcttatgcttcacgccaattgcgtcctcgtgaagttaactatccgacccatgatttggaactagcagctatggtctttgccttaaagatttggaggcattatttataccgtactggttttgaagttttcagtgatcacaagagtctcaaatacttgtttgatcagaacgaactcaatatgaggcaatgaagatggatggagttcctcaaggattatgattntggtctttcctaccatcc

SEQ ID NO: 16456 - DNA, 369 bp, Glycine max
  unsure at all n locations
tatcttcggggacaggcgtgggtttgtttcagtgaagtcactgctgcaagcaatgcagtgcgacaaatgcaaaacttccctttctatgacaaacctatggtaattgttagattacacttatctagtatttattattacaccgaaacttatgattctgattcatatgtaattacctaatggtaatcaacttatagtgctgttgataatttctttacagttctgttcataactctattatatcttgtaccaaactttnggaaccatttctagtaaccaatgttatcttactgttcttttccccttttatcttgtatgttctagattctcttacttggctactagggatttatgttcgtgcccaaaaaatac

SEQ ID NO: 16457 - DNA, 414 bp, Glycine max
tgtgaaggaataccttgaagataattccaaaccattagtaattgaccgtaactttgtgattgatgcgctaccttcgggaaaaatcaatgaccttcgcaaaaatataaagctggtaatgggcgttgggtttgcaaaggagtgctacgaggtgtactgtaactggaggagggaaagcttaaaggagtgcttaataaatttattaggcttgccagagattaatgtggaggagaaaagtagattgttggaatttgaaaattacattcttagaagacgtattgaggctatccaggtcgctcttggaacactaattcccagtgagcgacgactctgtgatagcgtcttccaggggttctcttatgtggctgatctttgtttcactgatatttgtcggggaacctcaattcaattgctgaa

SEQ ID NO: 16458 - DNA, 370 bp, Glycine max
ttctttttctttatgattttgatctgaagctattgtatggcattcacaaggcttcatcttctggcgccatgaagcttgaacccaaagcttttggtggcaaatttcctgctcaggttagtctctttcattttcctgtctaattaaattatcctgatcctgtcgttgattaatatgctgatggctcatggctaacaccttcaggtgcggttcaaaattgcttctgattgtgttccattacccgaaagcattttcaaaaaagccatcaaggataattataatgaaaagcacaagttcagaacagaacttaccgttagacaagtaagaattaaatgtaacctctggtggcctgtctgtctgtttctatcattct

SEQ ID NO: 16459 - DNA, 368 bp, Glycine max
agcttgtgaaaacaaaaaagtgcaacacatttgatatagtttataggcttctgaagttggctctagtcttgccagtagcaagtgcaagtgtgaaacgtgttttttcagctatgaagtttgtgaagagtcaactatgtaacaaaatggatgatcaatggttaaataatcgtcttgtaacttttatagaaagagatgttcttggaacaatcaacaatgaagttattttagctcattttcaaaaaatggatagtagacgatttttattgtaaatacatttccttaaacaacattatttcttattttcaatatattttagtctattagttcttttatattttacccacactgatatttattgtctggatccg

SEQ ID NO: 16460 - DNA, 347 bp, Glycine max
  unsure at all n locations
ctcncactcgataatggagacacatgaacagcgctttgcaatgacattcacggagctccaaataagagaggtatattgaggaatgtcttgagggtcctctcttatgcaatcatggaacacagctccaaactcgaaagtggaggacacatgaacaaccctaagcaataacattcatgtggctctggaacaggatgagaatggacgattgacttgagggtcctctcttaggcaatcatggaacacagctccaaactcgaaagtggaggacacatgaacagccctaagcaataacattcatgtggctccggaaccggatgataatggaggattgccttcacggacctctc

SEQ ID NO: 16461 - DNA, 372 bp, Glycine max
  unsure at all n locations
ttgcttggaccctcaagaaattttggtgctactattgaacaaccttccaacagtacaagttctgatcttaatattgtcttagtttctcaagttgcacagccttctgatgctcctttgcagttttcaacttctttcctttcttttgctagtgtttcaaatggaaaaaatgagggtttggatgttggaatctcacgtgaggatgagatggaggaagaagctcctgagacaagtaacaacacaactgaacttattttaagaagctntggcgggtttgcgattaactcaaaccctaacccatcaatgcctaagacaaatccttttgggggttcatttaataatttagcaacaagtttatcatgctctacagttaca

SEQ ID NO: 16462 - DNA, 413 bp, Glycine max
tggatttccttttagtaaggaatctatccttccttatatggagccaaacctagtcccccttattaagaactagctcctttcctcctctattgcctttagttgaataaacctttgtttggttctctatttggttcttaaccctctcatgcaacttcttcacaaactatgacctacattccccttctttatgtataaaagaagtgtcaagtgggaagggaatgaggtctaagggtgttatgggattgaacccatagacaacctcaaaaggggattgctaggtggttctatgaacccccctattgtacgaaaattttacatgaggaatatactcatcccaagacttatggttgccttttagaagagcccttaaaagggtggataaagacctattcactacctctgttggcccctta

SEQ ID NO: 16463 - DNA, 427 bp, Glycine max
  unsure at all n locations
ttgaaatgttagattctcagactcggattatggatgccacagctggagactgaatgttgatttgttatgtgtgcatatatagtcagttcttgatgtaaatttcattctttaggtatcatcttattggagattttaacattttatatgtacagtctagcaattttaacagcatatctcttgtagggctcatgttagactacaaagaagttaccctatctcactttagttntgctagcttctttctgatgttcaacactgggactttatgtccatattgatgttttgcttccttttggtatttgagagaagcaaaatttgatctaacttctatttaaccaaaagatataagcctctcatggaaaaactctctatgggtttgatgtactttgatcttaaacaagcgtccaacatatggttacctggttgg

SEQ ID NO: 16464 - DNA, 410 bp, Glycine max
tgtggctcttcacgtctggaatatgaatgtagcatatagatccaaagacccttagatgctttgctgatggcttcttcccgttccaagcttcaattggagtcttgtcttttacagacttagttggacatctgctgagtatgtaaacatcagtgtatactgcttcagcccagaatgtgttatgtagtcccttcttcatgagcataaatctagccatctccataactgtgcgattctttctctcagacactccattttgttgaggagaatatgcgactgtaagatggcgctcaatgccttcatcctcacataatctatcgaactcgcgagaggtgtactctatgtcgcgacactgcttaatactttatcacctttcactttgattttaacaagggccttgaactgttagaata

SEQ ID NO: 16465 - DNA, 382 bp, Glycine max
agcttaaacattcaacttcgagcgtctcgatatattacgagtctcaaacagacatccgagtaaaaagttattcgtttgaatttgctcagagcttcaacgttcaattttgagcgtctcgttatattacgggactcaatcagacatccgagtaaaaagttattgtcttttggattggctcagagattcaacattcaatttcgagcgtctcgatatatcacgggactcaatcagacatccgagtaaaatgatattgtcccctgaattggctcagagcttcaacattcaatttcgagcatctcgatatatgacgggactcaatcagacatccgtgtaaaaagttattgtgcgttggattggctcagagcttcaacattcaatttcc

SEQ ID NO: 16466 - DNA, 422 bp, Glycine max
tcttggggttggctggctattatagaaaattcattgagtgattttctaaattggcactgcctctaactaagttgactcgtaagaatgagaaatttgtctggaatgagaagtgtgatcaaagtttccaagagttgaagaggcggttgacaacagctccagtgttagttttgcccgaccctaagagaccatttgaagtgtattgcgatgcaagcgggcaaggcttggggtgtgtgttaatgcaagagggaagagtagtggcgtatgcttcacgccaattgcgtcctcatgaagttaactatccgacccatgacttggaactagcagcggtggtgtttgctttaaagatttggaggcattatttatacggtactcgttttgaagttttcagtgatcacaagagtctcatatacttgttcgatcag

SEQ ID NO: 16467 - DNA, 407 bp, Glycine max
tgttgaggccattattcttgaagcttctaaactttatacaagaatgaagctctgataccacttgtttgacaagtggccttagaaatcttaagaatggggggttgaattaagattatgcttactattcccccaattaaaacctactcagatttttatgcaagttctgagttccctttataataaatgacttagatgatgaatcaaatgagcaaactgaaatgagactaataaacaacagctaatataagagataaggggaagagagaatgcacaaccagatttatactggttcggccacacccttctgcctacttccagtctccaagcaacccgcttgagagtatcactatctttgtaaattctttactagtattgtaccacacaacgactttctgatgaaaatcctg

SEQ ID NO: 16468 - DNA, 385 bp, Glycine max
taataaatgtatatattgtttagaacaagcttcccgtcagaggtaccttaagtttcatgggataatttcttcatttggttttgatgaaaaccccatggatcaatgcatataccacaaggttagtgggagtaaaatatgctttcttgttttatatgtagatgatattttactagcagccaatgatcggggttcgctacatgaggtgaaacaatttctctctaagaattttgacatgaaggatatgggtgatgcatcttatgtcatcggcatttacattcatagagatagatctcgaggtattttatgtgtatcacacgaaacctatattgacaaaattctagaagagatatcggatgaaagattgtcaccaactgttgcccccatt

SEQ ID NO: 16469 - DNA, 351 bp, Glycine max
tctaaatgtttcaagcattggacgattcttatgaagaattaaatacgatagatcgtgaagtgtcttatgatagacaatgacttggaattctattctacgaaattcaatgaattctatcaagattaaggcatcacaagatagagtaacttacgctatactttgtctcaaactggagtaactgatagaataaactagaccctattggaaagggcgcaatacattctatccaatgtaggagttgaataggagtgtctgggctgaaacattcaacgcaacatactatctcaagaatcattcaccatgcactatcataaattttagaactcgtagtgaagaatggtctaacaaact

SEQ ID NO: 16470 - DNA, 412 bp, Glycine max
tctctcagcaactttgactgcaaaacttcacaggtgctttatggcttctttgcaagtgacaagacaagctttggcatctgagtctcagagaacaccaccctcagtgcaaaatgcaacaacctccacaaccacaccaattagcaacaacttcagtgtgaagagtgagcaaactcatgcagtgttgccacataagagaccagaggaggagcaagagtcagaggcaaataggggtgtgaaaagggttaaggctgtggaaaatgttcctctgcaattcaagcctcttgaggaagatcacatagagcaaatgattgaggagcttcttgattatggatctattgaactctgctctgtcatttcaccccaggccctctaattgaatgtgcatgtttttgagctgaatttaaagtcacaa

SEQ ID NO: 16471 - DNA, 413 bp, Glycine max
  unsure at all n locations
taatgaccctcaatctttcaatgattatagacctatctttcttatagggtgtgtctataaaattgtggcaaaagttttggccaagaggctggccattgtattacctcatcttatagatgaaaggcagacggcttttatgaaggggagacacatccttcatggtgttttgattgccaacgaggctttagctgaggccaagtctagaaataaaccttgcatggtcttcaaagcggattttgaaaaggcatacgattcggtttattggggatttcttgactacatgctcatgaggatgggattctgtgaaaggtggaggaaatggataaatggttgtctatccactgcaaccatatccattntagttaatggaagcccatctaaggaatttgctcctaagagaggtctaaggcaag

SEQ ID NO: 16472 - DNA, 354 bp, Glycine max
  unsure at all n locations
ttctttgatgtatgagaagatgagtggagggagagggagagaaggggcacaaaatttatgcatcaaataaggtctaaactttgaagtgtgatttcttaaatgatcaaagttgaaaaaatgcacacacaaaagctttatttatagcctaaatgtcacacaaaattggagggaaatttgaatttctattcaaaattcacttgaatntgaatttgtggagccaaaattttgctaattatgattagtgaatttcagctatggttcagcccactaatccaagatcaagtctaatattctccactaagtgtgcttagatgtcacgagacatgtaaagcatgaaggacatgcacaaagtgt

SEQ ID NO: 16473 - DNA, 430 bp, Glycine max
gacctataaaactcagcttccaggatggccccctgcattcagaacttaacttctaccagggatgcagagacgggaagcaaactcttgaggatcaatcctcatcctcgtaaatctggaataggtaggcagtgtctcaccctcctctaaaactattggggtttcaaagaaggtatttaggctgtcagcatcaatcttgattaagtgtcctgatgcaatcctaccccgcaagggcattggatagaaaactccaagtagattgggccaaagatgcaagagaaggccctagggttcttatgagccttagggtagatttcgggcccatgggctaagtatgagcccacttatctttgtaaatattaaattaaggtttcattatttttgggccttgcatttacggctccataatgtaagtagggtaccctagaaatat

SEQ ID NO: 16474 - DNA, 402 bp, Glycine max
  unsure at all n locations
tcaagaaaaagatggcctcagcaaattccttatttccagaagggaattctatcaatagacctccaatctttaatggagaaggttaccactactggaaaacccgaatgcaaatttttattgaggcaatagatctaaatgtctgggaagccatagaaatagggccttatatacccaccacagtagaaagaattacaatagatggtagttcatcaagtgaaagcataactatagaaaaacctagagatagatggtctgaagaggatagaaaacgagtacaatacaacttaaaagccaaaaacataataacatctgccctgngaatggatgaatatttcagggtttcaaattgtaagagtgctaacgaaatgtgggacactcttcgattaacacatgaaggaacta

SEQ ID NO: 16475 - DNA, 406 bp, Glycine max
tgccgccacggagttttccgactattctcttgtgtggtggaacaagctacaaaaggagagagcatgatatgaagagccaatggttgatacatggacggagatgaaaaagatcatgaggaagcggtatgttccggctagttactcaagggacttgaaattcaagctccaaaaactaacccaaggcaacaagggggttggggagtatttcaaggaaatggatgtgctcatgattcaagcaaatattgaagaagatgaggaggtaactatggctcgatttcttaatggtttgactaatgatatccgtgatattgttgagctgcaagagtttgttgaaatggatgatttgctttacaaagcaatccaagtggagcaacaattaaaaaggaagggagtggctaagaggagt

SEQ ID NO: 16476 - DNA, 338 bp, Glycine max
  unsure at all n locations
ttcttgcagcgcatttctgatgaactttaccagaaattgcggtaggaggtcccaagactgggaagctcccagtgaagggttctgcctttcttacagctgaaggatcatccagatcaagccttgctataagttcaccagcctgcaaaaggtgatacaattttattatctttttcaatttcaacaattgtacttcctatgtggaatagaatgctatatacctgcattgcttgaccttcagacattttgaaatgaataatcccagaagcangcgaaagaagaggcatgcacattttcatgacctcaacttcagcatacggtgtgtcagcatcaacatgact

SEQ ID NO: 16477 - DNA, 258 bp, Glycine max
  unsure at all n locations
gctaacccatggaagctcctaatatctcccacactttttggggtgggccattcttggaaggacttgattatctcaagttccacttggaccccatttctaccaactacgatacctaagaaaactatattatctacacaaaaggtacacttctctatatttgcatagagggtgttttcctaaggacagaaataactttctgatatgtactaatgatctttangctcctactatccctaaaattcatcaaataacaacaca

SEQ ID NO: 16478 - DNA, 405 bp, Glycine max
tcatgctcaagtatgtatggcaaaacttataattgttgttcaagacatacaagtgagcttgttacaaatcttctacacttggagtgatgacatgcagtcctcttgaacctttaccaccgactatgacctcatgccaacactcaagacggccaagacgtatatccttctcaatgtagactcaacaagagtcaattgctacttctgcgcatatacctgtgaacaatagatgcttctggatgatacaaattctttatgtatccttttaagatcttcatgtatcactcaaccgggtacatccaccgcaaataaacaagaccacaacatttgatttctctgaccagatgcacactcaagtgaatcatgatgtcaaagatggtagggggaaaatacatctccaactggcat

SEQ ID NO: 16479 - DNA, 397 bp, Glycine max
taaacattcaatttcgagcgtctcgttatattactggactcaatcagacatccgagtaaaaacttattgtcgtatgaattggcttaaagcttaaacattcaactttgagcgtctcgatatattacgggactcaatcagacatccgagtaaaaagttattgccgtttgaattggctcagaggttcaaaattcaatttcgagcgtctcgatatatttcgggactcaatcagacatccgagtaaaaagttattgtcgtttgagttggcttagaggttcaacattcaatttcgagcgtcccgatatattacgtcactgaattggacatccgagtgaaaagttattgacgtttgaatttgctctgagcttcaacattcaatctcgagcgtctcgatatatta

SEQ ID NO: 16480 - DNA, 413 bp, Glycine max
tcttagtttcagatgatgcagatgagtttgtggctacctcatgcactcctctaatgactatagcatcatttctagcgctaaactactgggagtttgaagccatcttcttaattaaatttctggcttcaacaggagtcatgtctctaagggctccaccactggcagcatctatcatacttctctctatgttattgagtccttcataaaaatattggagaagaagctgctccgaaatctgatggtgagggcaactgacacatagttttttaaatctctcccagtattcatataggctctccccactaagttgtctaatacttgaaatatcctttctgatggttgtggtcctggaagcagggaaatctttttctaagaatactctcttgagatcatcccagctcgtgatggacctt

SEQ ID NO: 16481 - DNA, 412 bp, Glycine max
tatgctgcaaacattacaacagacctcctcaatttcagcagcaaaatcaaccacagcagaacaattatgacctctccagcaacagatacaatcccggatggaggaatcaccctaatctcagatggtctagccctcaacaacaacaacagcagcctgctccttcctttcaaaatgatgctggcctaagcaagccatacattcctccaccaatccaacaacagcaacagccccagaaacaacaaacagttgaggctcctccgcaaccttccctcgaagaacttgtgaggcaaatgactatgcagaacatgtagtttcaacaagagaacagagcctccattcagagcttaactcgccagatgggacaattggctacacaattaaatcaacaacagtcccagaattctgacaagtt

SEQ ID NO: 16482 - DNA, 412 bp, Glycine max
tggattgcagatccagtgcactcaacatattcatttttatctacaatgtccgcaaaaaattctgtgggattgagtaactaagaatcaccaacaaagttaattagtttattaatcaagtacttttttttatcaatttataaatacatacgtgttgcattattaattaatttaatacttacttctaaccactcttgagctcctgcaggctcccatgctgctaaaccaccttttttactctgcaataaaaaaaatgtggtttagttaaaaataaatgtggtagtaaaagtaaataaagcatcaatgatcaaagtcctttgtcaaccctaacttattattgatcaaatattaagtaacaaagaaaaggggccattagttgattgatgattggttaattaaaaggatatggacataa

SEQ ID NO: 16483 - DNA, 417 bp, Glycine max
  unsure at all n locations
tctaaactttgtacaagaatgaagctctgatacctcttgttttacaagtggcctcagatatcttaagaagggggggttgaattaagatattccaaacttttctcctaattaaaaatctatcttactttttacttaagttatgaattcccttaatgacaatcttcttaaatattaattcaaatgaagcaacttgaattatgaatataaagcaataataaataaaggagattaagggaagagaaaatgcaaactcagttttatactggttcggccacacccttgtgcctacgtccagtccccaagcaacccgcttgagagttccactaacttgtaaattccttttacaagttctaaacacacaaggacaacccttcctttgtgtttagagattctntacaacaagagactcacagtctc

SEQ ID NO: 16484 - DNA, 233 bp, Glycine max
ttctttgaaatctcggataaaccaaatcatgttgataaattgcaaaaagctctttatggtttgaaacaagcccttagggcttggtatgaacgcttaagtaaatttcttctaaaaaaagaattctctagaaggaaagtggataccacattgttcatacaagaataagcataatgatattttggctggtccaaaaatatgatgatgatataaattttggaaccactaatgattca

SEQ ID NO: 16485 - DNA, 415 bp, Glycine max
tgtgcattcaatatcctgatgaggatgttccatatgttttcaagactggactaatacatttgctgcccaagtttcatgatcttgcaggtgaagatcctcataagcatcttaaggagttccatattgtctgttccaccatgaaatcccttgatgtccaagaagatcatatctttctaaaggcttttcctcattctctagagggagtggcgaaggattggctgtactaccttgctcccaagtccattaccagctgggatgaccttaagaaggtgttcttggataaattcttccctgcatctaggaccactgccatcagaaaagacatttcaggcatcatgaaacttagtggagagatcttgtatgagtactgggaaagattcaagatattgtgtgaaagctgtcctcactaccagat

SEQ ID NO: 16486 - DNA, 401 bp, Glycine max
gttttggttgtgcatcttcttctctgtttgttgattcttttcatggctaggctggtaaatgccaacaacttctcctgtcacagttgggtgttcccaaaacatgtctctcaccttttcaaaataaccgtagctcaaggatgtcatcagcacagcttttgatttcggctttcctggtgaattaacaatatcccccttttggttaacatcaggcaaaagattctccttcaaagtgcaagctaagatctgatccaacacatgttgaaatggtccagttctagtatcaaacactcttatttggatgcctactctttcatcaacgtcagctaaataagcttgatagtatctgctaacaagtcctcatactttgttggtagggtggaacagatatctacccaagaaat

SEQ ID NO: 16487 - DNA, 351 bp, Glycine max
ttcttctcgatatgtgatgtgcatgaatcgaacatccgagttaaaagttatggcgatttgaatttctcgaaagctttcggtatttaattttgagcatctcgacacatgatgcgcccgaattggacatccgtgtgaaagttaagaccacttgaatttctcgagagcttcgctattcaatttggagcgtctcgatatgttatgcgcctgaatcatacatccgagtgaaaagttatgaccatttgaatttctcaagagcttccgttgttaaatttcgagcatctcgatatgtaatgcgcctgtatctgacatccgagtcaaaaggtatgaccttctgaatttctcgagagcttc

SEQ ID NO: 16488 - DNA, 331 bp, Glycine max
  unsure at all n locations
agctttaatgtgatgcatttggggcaggcataggtttgtgttgatccaagaagggcatcctattgcatatttttttagaaactgaatgaagctgctcttagttattctacatatgataaggaattgtatgccttaattagagctttgtagacttagcaacattatctcttgcccaaggaatttgttattcatagtaatcatgagtctttgaaatatttgaaaggacaaggaaagttgaacaagaggcatgaantttttattcactatgatcatgagtctttgaaatatctgaaaggacaaggaaagttgaacaagaagcatgctcttgttg

SEQ ID NO: 16489 - DNA, 361 bp, Glycine max
attcttttctatgcagagaatatccaaggaaaataccttcatctgacttagcatcaaattttcctaagttatcttttccattattcaatacaaaacatttacaaccaaagatatgaagatgagagatgtttggttttctgccattgaccaattcatatggagttttctttaaaatgggtcttattaaagccctatttaaactgtagcatgcagtgttaacggcttcagcccaaaagtattttggaagaggagtatcatttaataaagttctagcaatctcttccagagatctatttttcctttcaacaacaccattttgatgaggggctcttggtgcagaaaaggtatgcttaatcccatg

SEQ ID NO: 16490 - DNA, 323 bp, Glycine max
  unsure at all n locations
atcttgagccatcacccaatcttgcaacacaatgttgggtccaaggttatcaaactcgacagtttacgtaaactcgtaagagttccatagactcaactcgtagacttatacgagtccacttcatataaaaataataacaaaatatctataaataacataccaattaaacattttaacaatataataaagcaaaatagtaaatcataaatttcacaatactgaaataaccaagtctagtaatgcatcactactagataataacttgcagattntatagtagtggtagagcattcccatcaaggatntgatgttattagagaata

SEQ ID NO: 16491 - DNA, 348 bp, Glycine max
gcatttctgatgaactttaccaaaaattgcggtaggaagtcccaagactgggaagctcccagtgaagggttctgcctttcttacagctgaaggatcatccagatcaagccttgctataagttcaccagcctgcaaaaggtgatacaattttattatctttttcaatttcaacaattgtacttcctatgtggaataaaatgctatatacctgcattgcttgaccttcagacattttgaaatgaataatcccacaagcaggcgaaagaaaggcatgcacatttttatgacctcaacttcagcatacggtgtgtcaccatcaacatgactgtcatctgcaaccaaatatct

SEQ ID NO: 16492 - DNA, 239 bp, Glycine max
tcttgatgtcctggatcgtcttcatcaatggagtcctttgattcttgataatccctggctacagatttggtaaggcagaaaggtgattgtaaacgccactttctggagaaaatgagtcaacaacaagctcaccaccatatgaagccgtggataagagtttgaagtatgacaaaatgaccgaatggagagagagaggggggacgggggctcacagtataaatccctttgatgacgacctg

SEQ ID NO: 16493 - DNA, 412 bp, Glycine max
  unsure at all n locations
ttttgaaatttcaaaaatatggtatttactctctttgttttaattaccagaggatgtaatcgattaccagtggccaaagtagtttctgaaatgttcttaaaattttgaatttgattttaaaagcctataatcgattacacaagacttgtaatcgattaccagaagttctaaacattttataaaagtctttagaaatttgaatttaaatttcaaagcctgtaatcgattacagcttgtgtgtaatcgattaccataacttaaaattcaaatttcaagtctttagagtcacaactctttagaaaaataactgtgtaatcgattacaccattttggtaatcgattactagtaaggaattttcaaaaataactcccaacaatcacatctattcaaatgtntttgaatggccatcaa

SEQ ID NO: 16494 - DNA, 328 bp, Glycine max
  unsure at all n locations
tttcttgtatgcttaaagtctcacgattgtcacgtgctcatgcaacaattgttagccgtggctatacgagacatcttgccaaacaaagtcaggttagccataactcgcctatgctttttcttccatgctatatgtagcaaagtcattgatcctatgaagtttgatgagctggaaaatgaggctgcaattatactgtgccagttggagatgtattttccccctgctttctttgacatcatgattcacttaattgtgcatatggtaagagaaatcannatgtgtggtccctgttatctacngtggatgtnacccggtgagcgatacatga

SEQ ID NO: 16495 - DNA, 412 bp, Glycine max
ttgataaatcttcggtagtaaccagtcaatctattataaccctttaactattagacattggtaggcttcggccaatctaacaccgcttgcaccttcccagcatccaatgctactccagctccagagactttatgaccaaggtattccacctcaagtaatccaaatgaacacttagagagttgagaaaataaaacatactattgtagtgtctgtaagacatactccaaatgacacaaatgagtagactaggaagggctatagaccagtatatcatcggaaaaaaacaagcacaaattttcctaactcattttgaaaaataatgttcatcaaacattgaaaggtagttggtgcatttgtgagtccaaatggcataacaagccattcataatggccatgatgagtcctaaaagca

SEQ ID NO: 16496 - DNA, 335 bp, Glycine max
ttcttgtccttttgggctttcactaagggtggaaatgagtgagccaaacttgaattgagttgaacacataaggcttgagtttgactaattatctctaataggcttaactttgtcatacataaaagtctagcttggcgagtctaattaaaagcttgcttaaagacgtctttgatcaattaattattttaaaatctagtgaaatactaactaaaaaaaagaaacttataaaatttaatatgagtaatgtacaaatccaaaaataattgataaacaaaatcatattgaattcaagtagttaaaatacaaagaatatataaaaaatgaaaaaaagagag

SEQ ID NO: 16497 - DNA, 334 bp, Glycine max
  unsure at all n locations
tttctttaacataaagagcatacttatttttacaacgaacaaacccattgtcttggaagtacttgtcaatgcgactattccatgccctcggtgcttgctttagaccatacaacgccttgttcaatttcaagatatttccttcttgacctttgatgagaaaacccattggttgttcaacataaacattttcttcaagatagccatttagcaatgccgattntacatcaagctgaaaaactctccacttcatttgagctgccaaggaaataaaaagacgaattgtctccatgcagacaaccggtgcaaacacttcatcataatcaactccatattg

SEQ ID NO: 16498 - DNA, 410 bp, Glycine max
tactgttgacaaaaatcttattgatgttggttatttaatggttttacttgcagtgataaggccttaactttttacttatatgcacattttctaattatttttgtttaaaccaataaggtttttacaaaaggagtggatgcggatactgtggttttgatggcagctcaagcttcaagacttgagaatcaagatgcaatagacactgccatagttggaatgttggctgatccaaaagaggttagtcattgatatattattcaccgcgattcttttgatgacatatttattagctgcaagcctctaactgtaatctgcagatcatcataattgttactgtattttagtttgcgttttaattttcttgtctaacttactgctacaaaggctcgtcttggtatccaagaagtaca

SEQ ID NO: 16499 - DNA, 407 bp, Glycine max
tctggtgggacatcttgacttgctttccaatctgacattcaccacagattctgccttcttctattttcagattgggaatgcctctaacagcacctttgtcaatgattttcttcatgcctcttaagtgcagatgtccaaatctttgatgccatattctgacttcatcttctttggaggatagacatgtggaggagtagctggtttcttgaggtgtccataggtaacagttgtcctttgatctgctgcccttcattagaacttcactcttctcatttgtcaccaagcattctgactttgtgaagtttacattgaatccttcatcacacaactgactgatgctgatcaggtttgcagtcagtcccttcaccagcagtactttgttcagactaagaagtccatcatgaact

SEQ ID NO: 16500 - DNA, 417 bp, Glycine max
tatggtgaataccaatgtttttgtagcatcatatctggtaggctcatcttacgtgattctgccttggctttatctacacagacttcactcaagtcagagaaacagaaagctgatgactttgaaagaaaatacaacgaagcccaagtttgtagcgaagaaagaggtaaaaaactggaagacacggagaagaagacacgtcagcttcaagaatcactgactaggtaatataaataatgaaaagtatgccctgatgtaattgttttcccgtgataatcaatgatgtcttgcaagggagagccttgtcacaatgttaaggttgttacttgtaaccctgaggttaccagtacaaatcttggaaacagtctctctgcttatggagttacagctgcatacatttactactccagaccctacttg

SEQ ID NO: 16501 - DNA, 415 bp, Glycine max
  unsure at all n locations
tgtagtgcagctccagatttcataattggttcattatcaggatgatagtcacagcctgcttcaaggatttgcttaccagatgacagtaaagttggaactttgtcatgacgaacctgcttctgattctcttttaactcaaaatcattagcataaggaagattagtatgtccattaaaataaccattgtttattgcggaagcgtcaagaagtgggttaaagaactgaaaaataaaaccagctgccaaacttgaacggtaagtggtttttgaggtatcatctttaggtacaatagtggctgtaaccaagatgacagcatcgtatagaatgctagcacttaaaagctttccagctaaaaactcctcaacattntttgctctgattgcatgcttactcccataagcaccaaaagacaacc

SEQ ID NO: 16502 - DNA, 414 bp, Glycine max
tttgcaagtattttacccaagaaaacaggaaagttttataaaaggaaaacagaaatataatagagatgaagtccaacaatacatacatccaatgcgctcagcttcaaccatacgaagatctaaaggaatttcttgaaactgtgcagcaatttgatgatctccaagagataaattgtgtgaaacatatgcttttatggtgcctgctccctttgtgaatcctgtgtcaacggtcaaatggataggattgggtacttctcgagaataaaattcatggattaatgcactaccaccagttactccaagaccagttgaatacctgcatgaaataaccataattagctacagtgaaaggaggttcataaactggtataatagaacattctctaagaacataaagagtaagaaggaataaaa

SEQ ID NO: 16503 - DNA, 327 bp, Glycine max
ttttctttgaatgggctaatgaggatagctgatgccagctccattggagcttgtaggcctaagatcttcttcatcaatggattcctttgcttcttggaagatgaatggcagcggaatggagaaagggagagagagaggagacgccacttcaaggagaagatgagtctagaagaagctcaccaccatatgaggccatggataagagcttggaggaagaaggagatgaatgaacggagagggagagaagagcacgacattttgtgctccaatgaactttgaatctgaagttaatatcaaatgatccaagtcaaaaaatgccaccctgac

SEQ ID NO: 16504 - DNA, 410 bp, Glycine max
tcaacatcagaccacgaccagggtgctggaactatttcacatggacttgatggggcctatgcaagttgaaagccttggaggaaagaggtatgcttatgttgttgtggatgatttctccagatttacctgggtcaactttatcagagagaaatcagacacctttgaagtattcaaggagttgagtctaaggcttcaaagagaaaaagactgtgtcatcaagagaatcaggagtgaccatggcagagagtttgaaaacagcaaatttactgaatactgcacatctgaaggcatcactcatgagttctctgcagccattacaccacaacagaatggcatagttgaaaggaaaaacaggactttgcaagaggctgctagggtcatgcttcatgccaaagaacttccctataatc

SEQ ID NO: 16505 - DNA, 401 bp, Glycine max
ttatacagatgaccacttgcgtattttcgcctgccctttaacttcacgggttattattgacagagattgatggtgcgcggtatatgacgtatatctctgcacgtcacctgagttcagagtcagtgtgacacaaattgcggggcggccgacaaaagtgagtctcttgctcctacgtatcctcaatttgtgatgaggaacttaaacttacggtattcttgatactgtgagactaaatagtctcggtgttttttcactacaatgcgaacatgcattagtaaagaaacaaaacttccaactgatcaaagcaacatatgcttttttctatgaagacaatgtgtctattgcggaaagagagtgtactgataataatttcacataaccatatatgagattttgatgat

SEQ ID NO: 16506 - DNA, 392 bp, Glycine max
gatgaaacggtggccttctcatggactctttcgaatgaaaatagcagcatttcttgcactgaagttgtgggagtaggaagccatcttctcaatcaaattcctaacctcagtatgggtcatatcaccaagagctccaccactggcagcatcaatcatactcctctccatgttgctaaggccctcatagaaatactatataaggagttgctcagaaatctagtggtgaggacagctcgcacacaatttcttgaatctttcccagtactcatacaagctctctccactaagttgcctaatgcctgaaatgtcttttctgatggcagtggtcctagatgcaaggaagaatatctccaagaacacccttttaaggtcatcccagctgagaatggatc

SEQ ID NO: 16507 - DNA, 374 bp, Glycine max
ttcttgcaacatatcacctatgttcaccactagggttccttcacatgggtttatatctatccactctcccttatttgatctgacttgaagccctcctatctcatgttgatataagatagtaatacaactcatatcaatgtgcatcccaagcccctcaacttgatcttctataacttctggagctgagtaatcgtttacccaacatatccaaccatgaacactccttcatacttgattcacttcttgtctgttcttttggttactttcatccgatagtcttcatgatgcaaaccatttaccttccaaaagtttacctatacctcaatttttgctactgcacatggtaattggtaagcctaacaagtacatggaaa

SEQ ID NO: 16508 - DNA, 396 bp, Glycine max
  unsure at all n locations
tgttcattagattnttcaaaaattattataaaatattccaagcatcataagcataaatgcataacacaacaaatctattctcataaacaacaacaaaatccgccgacgaaatttcttgatgataatgcttttttgataaactaatcaacgacgctaagaaattgagttaaaccttgattcctaatcagaaacagaatcctcaccatgaagcagttccaaggccactccgtcccgtcctctctcgaaaccttcggcctcgaaatcccccaataactggactccaccacgctcttctcagactcggccttctccttctccggaaacttcgcttccgccggcgaagccatcgtcctcttccagtagaagaaccctccattcgcgccgccagcgcagagt

SEQ ID NO: 16509 - DNA, 380 bp, Glycine max
  unsure at all n locations
agcttatgctgccaacacttataatagaccccctcagcagcaaaagcaacaacaacagaataattatgatctttcaagcaacagatacaatccaagttggagaaatcatctaaatctgagatgggcaagtcctccacaacaacaacaacctgtccctcttttccagaatgttgctggtccaagcaagccatatgttcctcctccaatacagcaacaacaacaacaacagtcacaacaaagacaacaagcaactgaggctcctcctcaaccttccttagaagaattagtgaggcaaatgaccatccagaatatgaaatttcagcaagagacaagagcctncattcagagtctgacanatcagatggggcagatggctactc

SEQ ID NO: 16510 - DNA, 416 bp, Glycine max
tatgacaatttgaaattttcgagagcttccgaagattaatttcgagcgtcttgatatattataagtctgaatcggacctccgtgtgataagttatgaccatttgaatttctcgagagctttcgttgttcaatttcgagcgtctcgatgtattatgcgcctgaattggacgtccgagttaaaaggtatgactatttttatttctcgagagcttctgttgttcaattttgagcgtctctttatgtgatgcgcctaaatcagactttcgagttaaaagttatgaccatttgaatttctcgatagctttcgttattcaatcttgagcttctctatatgtgatgcgccagaatcagacttctgtgttaaaagttatgaccatttgaatttctcgagagctttcgttgttcaatttgatatg

SEQ ID NO: 16511 - DNA, 356 bp, Glycine max
attttgggatgaaacagatgtgattcatcaaaaattacatctctgctgagaagaactttcctttcagttggtgaccagatcctatagcctttcactccatcaccataacccatgaacagaccctttctacattaacatgataataagcattgcagccaaatactcttaggtttgagtagtttggtggtttgccattccatatttcaataggagttttaagtcctatagcagtagagggtgttctattaattagaaagcaagttgtattgatagcttctccccaaaaacttctgttgagaccagcataggacaatagacatcttgttctttccaggagtgttctattcattctttca

SEQ ID NO: 16512 - DNA, 349 bp, Glycine max
ttcttgccgccattttttttccgactatgttcttgtgtggtggaacacgcttcaaaaggagagagctagaaatgaagagccaatggttgatacatggacggagatgaaaaagatcatgaggaagcggtatgttccggctagttactcaagggacttgaaattcaagctccaaaaactaacccaaggcaacaagggggttgaggagtatttcaaggaaatggatgtgctcatgattcaagcacatattgaagaaaagacgaggtaactatggctcgatttcttaatgggttgactaatgatatccgtgatattgttgagctgcaggagtttgttgaatggatgatttgct

SEQ ID NO: 16513 - DNA, 387 bp, Glycine max
ttgaacaacggaagctctcgagaaaatcgtgtggtcataaattttcacacagatgtccgattcggggaaataatatatcgagacgcacgaaattgaacaacggaagctctcgagaaatttgaatggtcataacatttcactcggatgttcgatccggggacataatttatcgagacgctcgaaattgaacaaccgaagctctcgacaaattagaatggtcgtaacttttcacgcgaatgttcgattcggggacataactcatctagacgctcgaaattgatacaacggaagctctcgagaaaattgaatggtcataagttttcacacggatgtccgattcgggaacataatatatcgagacgatcgaaagtgaacaacggaagctct

SEQ ID NO: 16514 - DNA, 330 bp, Glycine max
  unsure at all n locations
cttagttcttagttatgaacagacacaattcacatgcagtaccgtttggttcatattgctgctggagaattacttacggcagaaattgccactggaagtgataatggaaagcgagccccacagtatatggagaagggacagttggtccctgacgaaattgttgcgatggtatgtatgtatgtatgtcgtgactaatttctcttcaattcttgtttctcatatcatatccttgcttctgtttatgctatatagatggtaaagagcgtctcttgaaaccagattcnaaagagaatggttggcttttggatggatatcccacgagcttatcac

SEQ ID NO: 16515 - DNA, 373 bp, Glycine max
atacccaaaatcttatctacagaaccaaggtctttcatatcaaaatttctagacaagaaaaacttcacatcatttatgaaattcatttactaccaaatatcaatatgtcatccagatacataaaatgacgcatccattatcatcaaattgtttcacatacacacatttatcactatcattaatttgaaaatcatacaaaagaataacttaatcaaacttttgtgtcaatgatttggagcttgtttcaaaccatacaaagaattaacaatttatttttcaagaaaaaatattttcaaagaaagtcacatctatagactccataatagtaccattagaaatttcaaatacttctgaattaataattaagaatcta

SEQ ID NO: 16516 - DNA, 403 bp, Glycine max
tctcatttgatccaacagaggatgagcatacaacctatttcactcaagtcacacccacggaattcaagcacaagagacttgatcattgccatcttgaaagaatgctaaacatgaaaaaaagaaaatatgcaaaagaaaattgaagaagtttcaaatggaagaatgcaagtctgttagcacaccaatgaatcaaaaggagaagtttagcaaggaagaaggtgttgataacattgatgaaggatattatgggagcttgattggatgtctaatgtatctcactacaacaagatcaaacattctatttgctcaaaagaacaaaactggaatttttgttgacaatcaagtagccattgctattgcaaacaatctcgtgtgtcatgggaagactaaacatttcaacatc

SEQ ID NO: 16517 - DNA, 368 bp, Glycine max
  unsure at all n locations
atgcgaaccaggaaaaatgaaatgaacagaaaacgcttgtgggattatcgtctacgggccttatacagagaaacgaatcaaggacctaaaaagggattattaaagaggttaaaaaaacggaaattgtaaaacaagaataacataataacagtattttacttgagtcataacataatttcttttatatttattatttgataatcgatacacattataagtatttagttttactatttatattggttactagatataaaacttagacggaatatacgcgttaaccgtaaaaatcataaaaatgtctttcgatagataagtatatnttcatgctagaatttattgacacatacgaattttgtgtatcatga

SEQ ID NO: 16518 - DNA, 387 bp, Glycine max
  unsure at all n locations
atcttaaagatgctccaaattaagatttcaaccactcgtttcagagtcttaatttcattattagattctacatgcatgtacttgtgtatatttcatgtgttgttgcataccgtaaagataataaataaattaaagtagcaaagattacaacggttatgcttactagcatatttggaatattattaaatagaaattntattaaaaatataataaatatactgataatattaaatgttatacacattttaatacatattttcatttaatgttatagtataattatccatctatttattcaggggtttggatcaacctctgatccaacccgattcaatccaattaaattagattgaattttttaagtgtttaagtcaaattcaattcaac

SEQ ID NO: 16519 - DNA, 370 bp, Glycine max
ttctttgaatagtatgaaagaccctcccttctactttgtaaaatagattcaatagaaactaggaaaataaacaaatatattcgccgagaaataggagagagggatttgaaccctcaatagttctttttttcgaactatattgattttcaagactgaagttgtcaaccactcaaccatctctccaaaagataatttatattctatatttatttcattgaataaaacatgagcatataaattgatacttattatgtgtgtacccataagggttgaacaactaccaagggtatggctgagaaccttttcggtcaaagccaaacacccccagccataaccagatatcccaaggtgactaattacccctcgggct

SEQ ID NO: 16520 - DNA, 392 bp, Glycine max
  unsure at all n locations
ctgganaatgatttcttttcaaaagttagtcgtattatgcgactaacaaactgcaaataaagcaaacaaagaatggtaaatttattagtcagtcaaaatattgcaaagaactaactaacaagtttgggatggaaaatgctaaacacatggccactcctatgagcactgcctgctatctggataaagatgaaaccgatcagtcaatagatataaagaaatatagaggtatgatcagatctcttctttatttatttgcaagtagacttgatataatgtttagtgtttgtatgtgtgcaagataccaagcaaatcccaaagaatctcaccttagtgcagttaaaagaataatgagatacttattaggcactataaatctatgattatggtatcct

SEQ ID NO: 16521 - DNA, 345 bp, Glycine max
ttttaagcctaagatacttatctgtggggggagttcgtatcccagggaatgggactatgccaagttcaaacaggttgctgataagtgtggggcagtgttgatgtgtgatatggctcatatcagtggtcttgtagcggctaaggtgatttgaattttctgtcttttctctttgttcttgttgaattatgttatcgattttatggttgtttatgcatctgaattagttttctttggagtgtagaggcagatgtattgtatgctctagaactagtatagatggagttgatagaacaatttacgtgcctgtactatgaaccaacatcttcagacttattcctgtcttat

SEQ ID NO: 16522 - DNA, 365 bp, Glycine max
  unsure at all n locations
tttgcatgcattcttgaacttttaaagcgtaaagttacgttactgtgttatttattaagattaatcctttagaaagcgtaaacatgttgttgtgcttgaattatttattaaaattaattgtatgtttattttggtatttaagcatacaatattaagctaaactaaataatttatgcatattaaatttaatggttaagagtttatatgtttcaaatattagataatcatatgcatataatatttatttaattctgaagttttgtgtgtatgatttatgattttatacatgcganattatcttgaatattntatacaatattatttggtttatttacattatttaaaatattatataaataattagc

SEQ ID NO: 16523 - DNA, 356 bp, Glycine max
tgtcttaacatcagaccacttccagggtgctggaactacttcacatggacttgatggggcctatgcaagttgaaagccttggaagaaagaggtatgcctatgttgttgcggatgatttcttcagatttacctgggtcaactttatcatagagagatcagaaacctttgaagtattcagagagttgagtctaagacttcaaacagactgtgtcttcaagagaatcaggagtgaccatggcagataatttgaaaacagcaagctcactgaattctgcacatctgaaggcatcactcatgagttctctgtagccaatacaccacaacaccatggcatagttgaacggaaaacaagactt

SEQ ID NO: 16524 - DNA, 388 bp, Glycine max
  unsure at all n locations
cgctttgagaaactcanatggtcattacttttcactcggatgtccgattcatgcgcatcacatgtcgagacgctcgaaattgataaatggaagctcttgagcaattcaaatggtcataaattttcactcgtacgtccaatacaggcgcataatatatcgagaggctcgaaattgaacaacggaagctctcgagaaattcaaatggtcataacttttcactcggaggtccgattcatgtgtataacatatcgagacgcttgaaattgagcaacggaagctctcgagaatttcaaatggtcattacttttcacttggaggtccgattcaggcgcataacatatagagacgctccaaattgattaacggaagctctagagaaattcaaatg

SEQ ID NO: 16525 - DNA, 356 bp, Glycine max
  unsure at all n locations
atctngacaggtttatgtgcaagtgctgctactggtggaggcacttgaatttggttgccagacctcaaggtgatggcactcacattttttggattctgcaaagtttgtgaagtcaatttgtcagaattttgggactgagcttgattcatctgagtagccatctgccccatttgatttgtcagactctgaatggaggctcttgtctcttgctgaaattgcatattctggatggtcatttgcctcactaactcttctaaggaaggttgaggaggagcctcagtttcttgttgtctttgttgtgactgctgctgtattggaggaggaacatatggcttgcttggaccagcaacattctg

SEQ ID NO: 16526 - DNA, 418 bp, Glycine max
  unsure at all n locations
nttcctatggttgttctactagggtttccaagcatcatagagaaggagaagggattagagccaccatttcactatctccgtgtgagggaaatttctctctctatagacattatttcacaaatcccaacagtgaaaatttgcagaaatgagttcctaacctggttttcaaatttcatgatgatctaatggttaacgagtttgagatcgtagttttactcagacaaatttgggtgtatgcgagaaaaagaaaggattttgagagagggagaagggaaaacgaatttgagaggaagagagagcgtaaagacatatcgtaaatgtaaaaactaacctaatatgtctttatttatagttagagtgatctcagcctattatttactctatttttcttaaatttataaaaagaaactctatttta

SEQ ID NO: 16527 - DNA, 394 bp, Glycine max
tgtaatcgattacacacatattgtaatcgattactataggagtttttcagaaaacattctcaacagtcacatctttttgtgtggttcttgaatggctatcataggcctatatatatgtgacttgagacacgaatttcataagagtttttcagaacaaaaagatcttatcctcttataaagcaaaatcgttttatcctcttacaaattccttggccaaattacttgtgattcaataaggaattatttgagtgctcaaattattcaatctatctctttcaagagagatttcttcttttcttcttcttcattctgaaaagggattaagagaccgagggtctcttgttgtgaaagaattctaaacacaaaggaagggttgtccttgtgtgtttagaac

SEQ ID NO: 16528 - DNA, 376 bp, Glycine max
ttctttgatgcaacatttggagaggttaatgaaacaacaagatgatgcgctccatgagaggttggatcaaatggagaatagagatcataatgaagaagaaaggaggagaagagggaatgatggtgttcctagacaaaaccgaattgatggtattaaactcaacattcctccatttaaaggaaagaatgatccggaggcctacgttgagtgggagatgaaaatagagcatgttttctcatgcaacaactatgaggaggaccagaaggtgaagcttgccgccacggagttttccgactatgctcttgtgtggtggaacaagctacaaaaggagagagcaagaaatgaagagccaatggttgatacatggacggagatg

SEQ ID NO: 16529 - DNA, 407 bp, Glycine max
tgtacattcaatttcgagcgttccgatatattacggtactcaatcggacatccgagtaaaaagttattgttgtttgaatttgttcagagcttcaacattcaatttcgagcttttcgatatattacgggacacaatcagacatccgagtaaaaagttattctcgtttgaatttgctcagggcttcggtaatccatttcgagcgtctcgatatattacgggactcaatcagacatccgagtaaaaagttattgacgtttgaatttgctcagagcttctacattcacattcgagcttttcgatatattacggactccatcagacatccgagtaaaaagtgctttgcggttgaatttgcttagagcttctacaatcaatttcgagcctttcgatatattacgggactcaat

SEQ ID NO: 16530 - DNA, 285 bp, Glycine max
tgcttgagccagttccaaatcactatgttgccttgagccatccccgacaacagttcctgagccataaggggacccacctttgaccttctccatctcatacatgccatctccaaatgtgtacccaaccggaacataaatcattccatggagaacaagctgagtgacagaggtcaacggggtctcttcttgtacacctccttgagaactagtgcttgagaagaaccctgcaggtttttctgctagtgcctgtgtatgccacagccctatagagccttctaaaaatgc

SEQ ID NO: 16531 - DNA, 294 bp, Glycine max
gtcacctgcggcatgcattttgagtttttcttcatggacgtcccgtggtgttcgtatgaatcttttggtgattcttacgggaagatggtgatgtagctccatgtggagcttgtatgccatcgatcttcttcatcaatggagtcctttgctccttaaagcataatgacatcggaatggatttggaacaatgatgatcggagacacctcttcatggagaagatgaatcaagaagaaacccaccaccataggaaaccatggataagagcttgaaggcttgagaacatgaatggaggg

SEQ ID NO: 16532 - DNA, 373 bp, Glycine max
  unsure at all n locations
ttctttgatatgncgggtgtgtaaacagcgatatatacacttattgngattggcaataaatagttactaacattaactggttctcaaattatatttataaactgggtaaaaatatgtctcacaatagcttatacatttgtttgatgccagattattggggcctggcaaaaacctgttatggttattgtaactgaacttctcttatgtggaacattgcgcaaatatctgcggagtatcccggccaatgtgctcggatgttcgcgcaacaattggatttgctctttgtattgcccgagcaataggaatgcttacactctcatgggatcattcaccgcgaccttaaacctggtattgtatatgaatgtccaacttg

SEQ ID NO: 16533 - DNA, 399 bp, Glycine max
tcaagaattatggcctcatcaaactacttggttccttaaggaaattctataaataaacctcccatctttaatggagtgggttaccactactggaaaacccgcatgcaaatctttatagaggcaatagatttaaatatttgggaagccatagaacaaggaccttatgttccctctataatagccggaagtgcaacaatagaaaaacctagagcagattcgactgaggaagaaagaagattagtacaatataatttaaaggccaaaaatattattacatctgccttaggaatagatgaatactttagggtttcaaattgtaaaagtgctaaggatatgtgggatacactacaagtaacacatgaaggcacaacaaatgttaaaagatctaggataaacact

SEQ ID NO: 16534 - DNA, 349 bp, Glycine max
tgtaaatcaaattccccttctcttcatcctcagttatctgcaagtactcggccgcgcttcgcgcggccacaatgttgtaagcactgagagtgatggttatgccatagcagaacttggcacacagctcaaatgcttccaccccacccggaaaatcacggagtcggactatttggtgctgtggagaatcagaactctctgagcataacctttgcaggcgcaaacatttggacaatagtggaaactgaacaacatcatgaacttgtgtgactaagcaatataaagattgaacaagtcttgttcaaaacacaaaatggactgagatatacaacttgaagagcttctaattttc

SEQ ID NO: 16535 - DNA, 387 bp, Glycine max
agtcttctatagaatgttcgttcctaatttctctacaattgcatcacctctcaatgagctggtgaagaagaatgtggcatttacctggggtgaaaaacaagagcaagcctttgctttgctcaaagaaaagcttactaaggcacctgttctagctcttcctgacttttctaaaacttttgagctaaaatgtgatgcctctggagtgggagttggagctgtattgttacaaggtgggcaccctattgcttattttagtgaaaaacttcatagtgccaccctcaactaccccacctatgataaagagctttatgccttaataagagccctccaaacttgggaacattacctttgttccaaggaatttgtcattcatagtgatcatcaatc

SEQ ID NO: 16536 - DNA, 373 bp, Glycine max
  unsure at all n locations
ttcttctaacaatttcatgtattattacgtgtttaacatatttattactcattgttttgccttttgccgtaggatatgatgcaatcctacccctcaagggcattggatagaagactccaagaagattgggccagagatgcaagagaaggccctaagattctcatgagccctatggtagattttgggcccatggactaagtatgagcccacttatctttgtacatattagattacgatttcattatttttaggccttgtatttagagctccataatgtangtagggtaccctagaaatgtangatttttcagcccttgtattttatggcacctagactagtttttgtattangggtaagtttgaatttcacatg

SEQ ID NO: 16537 - DNA, 412 bp, Glycine max
  unsure at all n locations
gggttacctccttcactacatcaagaatcaccgagttgactcttctatgtggttgtcttactggtttagccccatcctctaaatttatccgatgcatacatgtggatggggtaataccaggaatgtccgccagggtccagcctatagccttcttatgcttcttgagaactgataacaacttctcctcttgctcatcagcaagggaggcatatataattattggaaaacttttgctatcatccaagtaagcatattttaaatttgatggtagaggcttcaattctggtgtgggcggctggataatggtagaaagagatggtttctcagcctgtacctcataaagaaagtcagaggtatgtgtacttcctgaaacatggttagttctatctgactctaganaatctatctcaag

SEQ ID NO: 16538 - DNA, 388 bp, Glycine max
tttgcatgcattctttgcagagactgctccatatcccaacaagccatcactgcctccatggcatgaacacggacatgctgctgcagttgttctttaaaggcacagagcaacagaacataatgggtctgcaacaaacaaaataacaaaactcataaaaaacaagctcttcacattaacatttaagcacattaattaagaatgagaaacaaaacccatcaaaaggacaagaactgagaaggactatgtaaatacaagtgtaaataaaccccaagatgccaaacttatataaatgtccctacaaagttaacaaaatgttatagtgattcagtactccaatcattatatgtagagtggatattaagtcagaatcaaatcttaactttaatat

SEQ ID NO: 16539 - DNA, 360 bp, Glycine max
tgcttccttaagaagattcctaaagaagctagagcttagctacacacacctctctaatagctaagttcacctccttgagatgagaagctagagcttagctacacaccccctataatagctaagctcacccatatggcaaaaaaacatgaaaatacaaaaaaaaaagtccctattacaaagactactcaaaatgccccgaaaatacaaggctaaaaccctatactactagaatggccaaaatacaaggcccaaatgaaggaaaaacctattctaatatttataaagataagcgggctcatacttagcccatgggctcgaaatctaccctaaggctcatgagaaccctagggccttcccttg

SEQ ID NO: 16540 - DNA, 401 bp, Glycine max
tgtgaaagcattatatgggttgaagctagttgtaatagcttggattgagagactaagttcattcttagttcataatggtttctctagaggaatagtagacactacactatttagaaagactcgtaaagaggatctgctaattgtacagatcgatttatgtagataacatcatctttggggctactaaagaaataatgtgcaaagaggtttatgagctgatgaaagaagaatttgaaatgagcatgatgggagacctaaagttctttataggacttcaaatcattcaaaaatatcatgacatttttatccatcaagagaaattcaccaaggaccattcaaagaggttcataatggatgaagctaaaccaatagctacccctatgcatccatctactgtcatt

SEQ ID NO: 16541 - DNA, 325 bp, Glycine max
ttcttgcagtttctgggaggctttgccaaagttttcttcgtgtttggtcatgtgctcaccataactctctgtttgcttccgtacatctgagggatctacatggtaaaaaactgggaaaacaagttgtttcatctcactgatcttggactgctccaggatcttaacaagttcatcaaggcaccatgtggaggatgcgtagttcttagaaaacacaatgattaaaatcttagattcttcaatggccttggatagagaaggtgaaataacattccccaccggcaggtccctatcatcaaagaaaattttcatcccttttccggacaac

SEQ ID NO: 16542 - DNA, 390 bp, Glycine max
ctgagatccatagatctaatgcaaggtatatgtttcatagaagggatttcgttgcttgtgttggttgattccagagccatctattcctttatatcctgtgtgtaagtagaaaaacttaagcttttctgtgtcttctttaaataaagatctagtggtggagacccctactagtggctatgtgataacttcttatgtgtgtttgaaaagtcctgcggagatgtctaggagaacattcttgattgatttgatttgtttgcctttgaaccagattgatgttattcttggtgtggactggatatcttccaaccatgtcttgttaaactgtattgataaaagagtggtgttcgatgattctgtatccgagtaagatatgaagttgatctctgccaa

SEQ ID NO: 16543 - DNA, 390 bp, Glycine max
ttctttgtacaacctctgcattgttgagcttctgcagcttactaacagaagttgctgccctgattttaccaacatcattttctgaaaacacaaagctaccggatatatcccatagctccacagtcccctcatcatgcaaggtcacgaacttgacaccagtaagaatgagattcttcacagcagacaggaagtaaactttattagaattcaaaaacatgatttaaaattatagagttagcactatcatctttaaagcttgaacctaaatatcacaaccatcaaacaaaaaatcaagtcacacacaaatgataaaactataacctaagttaacaaaaaaaaattacaactgtcaactggtaatcaaggtttaaaaaaaaaagtctgcaacat

SEQ ID NO: 16544 - DNA, 419 bp, Glycine max
  unsure at all n locations
taagaaatctatatatggtttanaacaagtgccctgttatggtaccttaagtttcatgggataatttcttcatttggttttgataaaaccccatggatcaatgcatataccacaaggttaacgagagtaaaatatgttttcttgttttatatgtaaatgatattttacttgcagccaatgatcggggtttgctacatgaggtgaaacaatttctctctaagaattttgacatgatgggtatgggtgatgcattgtatgtcattggtatttagattcatagagatagacctcaaggtattttaggttcatcataggaaacctatattaacaaaattttagagagattgcagatgaaagattgttcactaagtgtcgctcccattgtgaagggtgataggtttaatcagaaccaataccca

SEQ ID NO: 16545 - DNA, 407 bp, Glycine max
  unsure at all n locations
cccgggatcctctgagccgccttttgcatgcaatcttgtagggttaaagtctcactattgtcacgtgctcatgcaacaattgttagccatggctatgcgagacatcttgccaaacaaagtcaggttaacgataactcgcctgtgctttttcttccatgctatatgtagcaaagtcattgatccagtaatgtttgatgagttggaaaatgaagccacaattatactgcgcctgttggagatgtattttccccctgctttctttgacatcatgattcacttgattgtgcatctggtcagagaaatcacatgttgtggtcctgtntatctacggtggatgtacccggttgagcgatacatgaagatcttactagggtatacagagaatctatatcgtacagaagcatcta

SEQ ID NO: 16546 - DNA, 381 bp, Glycine max
agcttgttcatccaataccctgatgaggatgtcccatatgttcttaaaactggactgattcatttgcttccaaagtttcatggccttgcaggtgaacacccgcacaaacatttgaaagaatttcacattgtctgctccaccatgaaacccccagatgtccaagaggatcacatatttctgaaggcttttcctcattcattagagggagtggccaaggactggctgtattaccttgctccaaggtccatcacgagctgggatgaccttacgagagtattcttagagaaatttttccctgcttccatgaccacagccatcaggtaagatatctcatgtattagacaactcaatggagagagcctgtatgagtactgcgagaga

SEQ ID NO: 16547 - DNA, 308 bp, Glycine max
tatcccatgcctttatagcggatgtagcatcacaaatcttcttgtacgcatcatcatctaatgctcgatagatgatgaacagagctttcttgcctctctctcttgaatccttaaaagtacttctttggtgcttggaatattgaagtctcatgttgcggctccttatagcctttttcaaccatttcccacacattatgtgctccaagacgggcttccattttgatgctccaattgtcatacgtgcccccctatacaagtggaacttggaaggatgacgtccatttcttacattactctagaggaatttc

SEQ ID NO: 16548 - DNA, 384 bp, Glycine max
agcttctaaactttatacaagaatgaagctctgataccacttgttagacaagtggcctcagatatcttaagaagggggggttgaattaagatattccaaactacttacccaattaaaaatctatttcactttttattcaagttataaaatcccttaacaatgaacttcttaaatattaattcaaataaaaaaattttgaatatgaatataaagcaataataaacaaaggagtttaagagaagagaaagtgcaaactcagatctatactggttcggccacacccttaatgaattgagcactcaaataattccttaatgaattgcaattgaattggccaaggaattcttaagaggataatatgattttgctctttgataggacaaa

SEQ ID NO: 16549 - DNA, 373 bp, Glycine max
cttcttctgcttgcaatttcgagcgtctcgatatatgaagggactcaatcggacatccgagtatattatcttttttgcattgtgaagcacgcaccgagcttctgttttcaatttcgagcattgtgatgcattacgtgactaaatagaacattcaagtaaaatgctattgccgtttgcatttgctacaagcttctgagttaaaagttattgcagtttgcatttgctacaagcttccgctttcaactacgagcgtctcgatatattactggactcaatcgatcatcagagcaaaaagttattgtcgttagaatttgttcagtgcttccgttttcaatttggagcgtatcgatatattacgggactcaatcggaca

SEQ ID NO: 16550 - DNA, 375 bp, Glycine max
tttcttcgtgggtagaggggctctgtctcatataatggcttgatcactggctgacatattctcaattagctctgttgcttctttcggggtcttcagttttatctttccccctgtacaagcatctaatagttgcttggtttgtggtctcaacccatatataaacatattcaattggattggctaagaaaacccatgagtgggagtttttcttaacatgcctctgaatctctccaatgcttcactcagagattcatcacgaaactgatgaaatgaaaaaattgcagcttatccttctacagacttggactctgggaagaatttctttaggaactcttcaacaacttcttcctacgttttcagactgatacccttaca

SEQ ID NO: 16551 - DNA, 331 bp, Glycine max
cggtcaagtggatacggaattgtttataaggtatgttgatttatatttttcatggaatcacatatcttgataataatttgagaattacatatgcgctagactttgaaatattgtatttattagggtacgctctctgatggacaagaaattgctattaaaagattgtttatcaattctaaccaaggagatacataatttaagactgaaatttcgctaacaggaaagctttagcaccgaaacttaattacactacttggcttctgctttgctaaaagagaaagatatttgattatgagtttgttcccaataaaaacctagatttattatattt

SEQ ID NO: 16552 - DNA, 384 bp, Glycine max
agcttgtatggttaaagtctcacgattgtcacgtgctcatgcaacaattgttagtcatggctatacgagacatcttgccaaacaaagtcaggttagcgataactcgcctgtgctttttcttccatgctatatgtaggaaagtcattgatctaatcaagtttgatgagttggaaaatgaggccgcaattatactgtgccagttggagatgtattttccccctgctatctttgacatcatgattcacttgattgtgcatctggtcagagaaatcaaatattgtggtcctgtttatctacggtggatgtacccggttgagcgatacatgaagatcttaaaagggtatacaaagaatctatatcgtccagaagcatctattgttgaga

SEQ ID NO: 16553 - DNA, 425 bp, Glycine max
  unsure at all n locations
tcttatccaaggctcatcttggtggtgaaactccttcttccatggcttattccctagtggatggcgcctcctctcacctcttctcctttgtcttccgctgcatctggaaaatcaccattaaaggacctcattgaagctcaaatatccagcctccatagaagccccacaagcaagcttccatcagaatggcaggggaaaatggtcctttttggtaacctggttcagcctgctatagtcaatgcagactctccaactgttctgcacccaagtaggaatcagctcctccttctcattntttatcacggtgaggccggttttcttcaggattacctggacagaactcacccattggctgtcggagataggataaatgattccagttngcaaaagcttggttacctccttcttcactacatcaagaatca

SEQ ID NO: 16554 - DNA, 377 bp, Glycine max
  unsure at all n locations
agcttacaaaaatttgtaaagggtgtcaatgagatatttggacaagagtacttgagaagacccaacaacaatgacatcaatcgcctactacaaattggagatggacaagggtttccaggtatgttaggttttattgattgcatacattgggagtggaaaaattttctgtcagaccctaattttgtccaaggacaatcattcatggatattttgattctcgctagccaaattgagctgtttgacaccagttaccgcgcaagacgaaagatcattcgatgttttggtcaagggtgtgaaagatactaaaagggaggggcaaaagggtcttttcanggttatttctagaccctggctcgcccaggctagcctttggctct

SEQ ID NO: 16555 - DNA, 384 bp, Glycine max
agcttatagaagaataagaaaggggcaaacagaagactcaccatcctgtcactgaaaacactcctctccatcaaacgaagaggcttgattccagcagatgactctctttcctgcatgacccgtgtgacaaacacatagttctgaaaggtgtaggcataccgttgcggctcggcataaaaagcatccaaaatgttaaagtgatcaggtccaacatcctgccacttgctaatgggttcatgaaccacctcaacaagatcacgcaactcgatcgtttcattcgctattctctggaggaaggtagtcttgccaacgctaatgttaccctcaacacagaatgttaagcgcttcttctgaacagaggaagaggaattgtcttccaactcc

SEQ ID NO: 16556 - DNA, 408 bp, Glycine max
  unsure at all n locations
ttctgtgtctnttttaaataaagatatggtggtatataccccaactagtggttctatgttaacttctaatgtgtgtttgaattgtcctgtggaaatttctggcagaacatttgtgattgatctaatttgtttgccctttagccaaattgatgttattctaggtatgaactggttatcttccaaccatgtcttgttaaactgttttaataaaactgtggtgtttgatggttctggagtaagtaaggatatgatatttatctctaccaaccaagttgtgacatctttaaaagaagattctcaagtgtacatgatcttgtctaacctagaaataaagaccaaggtttccatgtgtgaccttcctgttgttagagagttctctgaagtgttccctgaggatatatctggtct

SEQ ID NO: 16557 - DNA, 417 bp, Glycine max
taaacattcaattgcgagagtctcgttatattacggtactcaatcagacatccgagtaaaaagttattgtcgtatgaattggcttacagcatagacattcaactttgagcctctcgatatattacgggactcaatcagacatccgagtaaaaagttattgtcgcttgaatttgctcagaggttcaaaattcaatttcgagcgtatcgatatatttcgggactcaatcagacatccgagtaaaaagttattgccttttgagttggctcagaggttcaacattcaatttcgagcgtcccgatatttacgccactgaatctgacatcccaggaaaaagctattgtcgctagaatatgctctgagcttcaacattatattacgagcgtctccatttttttcgggactcagtctgacatccc

SEQ ID NO: 16558 - DNA, 382 bp, Glycine max
tgttaatgtctaccatgaaaagcggttaccttgttgtattgggttgaaaaaaaatatataatttaggaatgattacatatcttgtattaccaaatgatagaattttttacgaacatccaataattgcattgactaataaataaatatttaactataactaattattatatataaaagaaataggatgtttagatgtacattgtattatatctattttatctttataactatattcataacttattatttgatttatattattacctgatataatcacccgctaactaattattatttttcattgaataaataaacatgaataaacagttacacgtgcatgtttattcctaaaatgttataataatatgtcattacctcaaca

SEQ ID NO: 16559 - DNA, 423 bp, Glycine max
tagcccatcatcaatattgatttcaagaaacaaaaaagcaagtagatatatcagtgaactgagccagaccaaggaaaaatacatcaaagaaaataaataatctagtatagctaattttataatcagataaagcatctgagacctgctgccatgtggtatcaacaggaggctgccgccgagcatcgccagcatcaaaatccagtacaccataatccctcaaccgaatctacacagcaataactaaaatcagaagtctttttgaggattaaatgcatggcattatctataagacacatttttcaaattgagacaaacccgaaggaaggcacggattctttgcaaattcccaacaccaccaccaagagcagcctaccattagataaaaaagcaagcagaaattaagtgttgataacaaatacaaat

SEQ ID NO: 16560 - DNA, 361 bp, Glycine max
agcttctgttgttcaatttcgagcgtctcaatatattattggcctgaattagacatccgaatcaaaagttatggttgtttatattatccatgtgcttcaatgttcaatttttagcatcttgatatattatgcagcttaatcgggcatctgagtgaaaagttatgtcatacgagttagccgagaacttcgttgttcgatttcgagcatctcgacatattatttgcctgaatcggacatcagagtcaaaagttatggcagtttaaactttccatgtgcttccatgattaattttgagcatctcgatatattatgcacctgaatcggactactgagcgaatagttatgccatatgagatagctg

SEQ ID NO: 16561 - DNA, 387 bp, Glycine max
agctttacattactcctcatgcttctcaccatgtctaataaggttcgatttcttcgttctgccacactattatgatctggagaactatgcatagtgtattggacaacaatcccatgttcttgaagaaatttcgcaaatgaacctggtgcttgtccatcctctgtgtatctaccataatactccccacctctatctgatctcacgatcttaatttgttttccacattgtatctcaacttcagccttaaaaactttaaaggcatctaaagcttcattcttagaatgaagtaagtatagatacatatatcgtgaataatcatctatagaggttatgaagtatttcggacaatatgcattcatgtctggacaacatatgtcttgtatgtat

SEQ ID NO: 16562 - DNA, 421 bp, Glycine max
tatgctgcaaacatctacaacagacctcctcaacctcagcagcaaaatcagccacaacgaaacaattatgacctctccagcaacaggtacaatctcgggtggaggaatcatcctaaccttagatggtcgaatccttcacaacagcagcaacaacaacaacagccttattttcagaatgctgctggtccaagcaaaccatacgttcctccaccaatccaacagcaacaacagcaacagccccagaaacaacaaacagttgaggctcctccgcaaccttcccttgaagaacttgtgagacaaatgactatgcaaaacatgcagtttcaacaagagactagagcctccattcagagcttaactactcagatgggacaattggctacacagttaaatcaacaacagtcccagaattatgacagat

SEQ ID NO: 16563 - DNA, 414 bp, Glycine max
tcttattcacataacaccaatagtattccatttataagcagagattgacgattcaaattacatatttataagagaccaaccaaacacaaagcaaccacagcttaaaacacccgtaacaaatcctagaacatttgaatttgcaaaggcgggccatgaccactttattctaaaacttcaaacacaacacatacttattatttattgatacatgtattacagctatctctgcttgaaggttatgcatgttgatctcacttgcagctgcatgggtcgcaagtgcagtttgatccacagttgcagccaccgttctcagctgcaacacccatttcagcaccctcgaattgggccttcaccggcccaacacccaaaactagagtctcatttgtgatcttctcaacgtagtcaaaagagtac

SEQ ID NO: 16564 - DNA, 375 bp, Glycine max
agcttgctttttgcaattctaagacactagagagcttccaagtatatgacatgtcccacttgtactttttctatctaatttgcatcctgcaaaatcagaatatgaaaaacctgttatgtttaaggaggtacctttaggataccacataagcaaacacttagcatgatatccaatctacttgcagttaggtagagaagtgattcaatcatacctctgtatcttgattcatccactaatttacctttctcatcaaagtcaaggtaggttgatgtagacataggagtagatgcttctttgcattttttcataccaaatttctttatcggttttatgcaatatttggtttgactgaggaaggttccatgtttcaattgc

SEQ ID NO: 16565 - DNA, 386 bp, Glycine max
agcttgttcttgattttttctaagttctttaacaagcttggaacaatatatttgtccttcatttaactgtctttgggcttggcggccacgatcaacaaagtactttgggcacctatgttaaacaaatggcctcagttatcttaagaagggggggttgaattaagatattccaaactatttcccctaattaaaaatctatttcactttttactcaagttatgaattcccttaatgacaatcttcttaaatattaattcaaatgaaacaatttgaatatgaatataaagaaataataaataaaggagattaagggaagagaaaatgcaaactcagttttatactggttcggccacacccttgtgcctacgtccagtccccaagcaacc

SEQ ID NO: 16566 - DNA, 424 bp, Glycine max
ttcgacctcttgaaaaagacgctaataattgcaccagttatagtggctcccaattaggggcaagaatttgaattaatgtgtgatgctagtgactatgcggtagagtagtattaggacaaaagagaaatggaagatttcatgctatctactatgccaacaaagtgctaaatggagcccaaaccaactacacaacaacggagaagaagatgctagcagtgtttatgcccttgaaaatttttgatcatatcttgtaggatcaaagatcattgtgcaaactaaccatttagctataaaatatctactcgctaaagcggattcgaagccaagattaattagatgggtcctgctactacaagagtttagtttagagatttaagataaaaatgggtgtgacaacctagtagttgatcttttatcgagacta

SEQ ID NO: 16567 - DNA, 413 bp, Glycine max
agctggtttggaagcttgagatgagtttgttggaccaagtggcctcggaataattaagaaggggggttgaattaattatgaacgtgtcttagctaattaaagaattatccttcttaatattactagattcaatgaagctttacaactaagttatgagaaagtaaagaacagaaacaataacttagacaaaagtaaagcagaaataaaaagtgcacagcggaaaataaagagtgtagggaagaagaagacaaacacaagatttatactggttcggccacaacccgtgcctacatccagtccccaagcaaccaccgattcttgagatttccaataaccttgttaaatcctttacaagcaaagatccacaacggatgtatcctcccttgttctctttgaacaaccaagtggatgta

SEQ ID NO: 16568 - DNA, 423 bp, Glycine max
tcttgctgatgtcatagtcttgaagtatgtctatgataccaaaaaacaaaaccacctcatagaactctccaattggttctcctacaagttgtaattcacaaccacttctcctcaccgtcctttcagcccttgctggcatgttcacccccaatttgatactcgcccaactgctaacacaaattagatagatgtaatatccaacaagacatgacttaagtaataatggtcagccggagctcgggaggaggttttaagataaattcgtagaagcaaggtacaaaatatacaaccatattaagaaattaaatatgccttacatcatgttgaaatattaatttttccaaattcaattgaacttaattatgccaatgtcaagatgaaaacaaaatgtgcattatattggcaacctatataaagagaaag

SEQ ID NO: 16569 - DNA, 420 bp, Glycine max
tatgctgcaaatatttacaatagacctcctcaacctcagcagcaaaatcaaccacagccgaacaattatgacctctccagcaacagatacaaccctggatggaggaatcaccctaacctcagatggtccagccctcagcaacaacaacagcagcctgctccttccttccaaaatgctgttggcctaagcagaccatacattcctccaccaatccaagaacaacaacaaccccagaaacagccaacagttgaggcccctccacaaccttccctcgaagaacttgtgaggcaaatgactatgcagaacatgcagtttcagcaagagaccagagcctccattcagagcttaaccaatcagatgggacaattggctacccaattgaatcaacaacagtcccagaattctgacaagcttccttct

SEQ ID NO: 16570 - DNA, 426 bp, Glycine max
tgaaggcatgtaacccacaatcttttcatagtagaactgatgcaatcctaccctcccaagggaattggatagcagactccaagaagattgggccaaagatgcaagagaaggccttaggattctcatgagccttagggtagattttgggcccatgggctaagtatgagcccacttatctttctacatattagattaaggtttcattaatttggggccttgtatttaaggctccataatataggtagggtaccctagaaatgtaggatttttcagcccttgtattttagggcacctagactagtttttgtattacgggtagttttgtaatttcacatgcattaagtgaatatttgatgtgtgcgttgagaaataaatctaattgaattgggagaagcccaatccaattataatttagagggggaggtg

SEQ ID NO: 16571 - DNA, 333 bp, Glycine max
agcttctcaatatattatgcgcctgaatcggacttccgtttgaaaagttatgaccatttgaatttctcgagagcattcgttgttcaatttcgagggtgtcgatgtattatgcgcctgaaccggacttccgtgtgacaagttatgaccatatgaatttctcgagagctttcgttgttcaatttcgagcgtctagatatagtatgcgcctgaatcggacttacgtgtgacaagttttgaccatttgaatttctcgcgagcagtcgtggttcaatttacaccttctcgatatattatgcgcctaaattggacttccgtttgaaaagttatgaccat

SEQ ID NO: 16572 - DNA, 416 bp, Glycine max
tctcgatatattatgcgcctgaatcggatgtccatttgaaaagttatgaccatttgaatttctcgagagcatccgttgttcaattttgaccggctcgatatattatgcgcctgaatcggacttccgtgtgataagttatgaccatttgaatttctcgagagcttccgttgttcaatttcaagcttttcgatatattatgcacctgaatcggacttccgtgtgacaagttatgaccatttgaatttctcgagagcttccgttgttcaatttcaagcttctcgatatattatgcgcctgaatcggacttccatttgaaaagttatgaccatatgaatttatcgagagcattcgtagttcaatttcgaccgtctcgatatattatgcgccataatcggacttccgtgtgacaagtcatg

SEQ ID NO: 16573 - DNA, 390 bp, Glycine max
agcttccttaagaaaattcctaaagaagctagagcttagcaacacacacatctctaatagctaagctcacctccttgagatgagaagctagagcttagctacacaccccctataatagctaagctcacccccatgacaaaaaaaagatgaaaatacaaaaaaaaaagtccttactacaaagactactcaaaatgccccgaaatacaaggctaaaaccctatactactagaatggccaaaatacaaggcccaaacgaaggaaaaacctattctaatatttacaaagataagcgggctcatacttagcccatgggctcaaaatataccctaaggctcatgagaaccctagggccttcccttggatctctagcccaatctacttggagtcttc

SEQ ID NO: 16574 - DNA, 420 bp, Glycine max
tccattgttcaatttcgggcttctcgatacattagacgcctgaatcggacctctgagttaaaagttatgaccatttgaatatctcgagagcttccgttgttcaatttcaagcgtctctatatgtgatgcgccttaatcggacttccgagtgaaaagtaatgaccatttgaatttctcaagagcttccgctgttcaatttctggcgtctcgatatattatgtgcctgaatccgacctccgagtgaaaagttatgaccatttgaatatctcgagaacttccgttgttcaattgcgagcgtctctatatgtgatgcgctcgaatcggacgtccgagtgaaaagtaatgaccatttgaatttctcaggagcttacgctgttcaatttcgagcgtctcgatatattatacgcctgaatcggacct

SEQ ID NO: 16575 - DNA, 350 bp, Glycine max
agcttaaacattcaacttcgagcgtctcgatatattacgagtctcaaacagacatccgagtaaaaagttattcgtttgaatttgctcagagcttcaacgttcaattttgagcgtctcgttatattacgggactcaatcagacatccgagtaaaaagttattgtcttttggattggctcagagattcaacattcaatttcgagcgtctcgttatatcacgggactcaatcagacatccgagtaaaatgatattgtcccctgaattggctcaaagcttcaacattcaatttcgagcatctcgatatatgacgggactcaatcagacatccgggtaaaaagatattgtcgttt

SEQ ID NO: 16576 - DNA, 384 bp, Glycine max
agcttatcaagaggatgtaatttagttattttgcatgaattgttgcaaaactcacatacttgagttcaatttttatgaataaaaaaaatgtttaaagctaattacacacttcaacaacaattatatttattgtaatgagaatgggacaaattcaatgaattattgtaaattcattttagaatattttcttaataatcttctaacttattaaattaagaaatattcattgtttttatatttatcaatttaataatatggaataaatttaacgaattattgtacgagacaaaagcttgcaacttttaccttagtgattcataattataattattaatgtgttgataagaaaggtaggaatataggtaaaaatgcactacaagataa

SEQ ID NO: 16577 - DNA, 416 bp, Glycine max
  unsure at all n locations
tgtaatcgattacacaaatactgtaatcgattaccataacagattttcagaaaatattctcaacagtcacatctttttatgtggttcttgaatggctatcaaaggcttatatatatgtgacttgagacacgaatttgctaagagttttttagaacaaaaaggtcttatcctcttaaaaagcaaaatcgttttatcctcttacaaattccttggccaaaacacttgtgattcaataaggaattatttgggtgctcaaattgttcaatctatctctttcaagagagattacttcttctcttcttctttattctgaaaaaggattaagagaccgagggtctcttgttgtaaagaaatttgaacacaaaggaaggattgtccttgtgtggttcagatcttgtaatanggttttacaagat

SEQ ID NO: 16578 - DNA, 351 bp, Glycine max
agctttgagccaattcaaacgacaataactttttactcggatgtctgattgagtcccgccatatatcgagacgctcgaaattgaatgttgaagctctgagccaattcacgcgacaatatctttttactcggatgtctgattgagttctttaatataacgagacgctcgaaattgattgttgaacctctgagcaaattcaaacgacaataacttttttctcggatgtctgattgagtcctgtcatatatcgagacgctcgaaattgaatgttgaagctctgagccaattcaaacgacaataactttttactcggatgtctgattgagtcctgtcatatatcgagacgctcga

SEQ ID NO: 16579 - DNA, 404 bp, Glycine max
  unsure at all n locations
ntaacttaatcaattcaaaagccttttgtgcttgttcattccacccaaacgcacccttcttcaaacattcggtcataggacttgctatagtgctaaaattctggataaagcgtcgataaaatgatgcaagaccaaggaaagatctcacctccgaaactgttgtagggctcggccaagtcttgatagcatccacttttgtttgatcaacggatactccatctttagacaccacatatccaagaaacaccacactttcaaccaagaaatcacacttttccctcttcccatagagtttttgtgctcttagggtctcaaatatttgtttcacatgagtgaaatgctcctctatagatttgctatacaccaatatgtcatcaagataaacaacaacaaacttacccaca

SEQ ID NO: 16580 - DNA, 416 bp, Glycine max
tcgagaaaattcaaacgacattaactttttactccgatgtccaattgagtcccataatatatcgagacgctcaaaatttaaaaaagaaactctgagcaaattcaaacgacaataacattttactcggatgtccaattgaatcccataatatattgagacgctcgaaatttaaaacagaagctctaagcaaattcaaacgacaataacattttactcggatgtgctattgagtcccgtaatatatcgagacactcaaaatttaaaacagaagctcatagaaaattctaacgacaataacattttactcggttgtccgattgagtcctgtaaaatatcgagacactccaaattgaaaacagaagctccgagaaaattcaaaggacattaactttatactcggatgtcttatggagtcc

SEQ ID NO: 16581 - DNA, 454 bp, Glycine max
  unsure at all n locations
tcaagaataatgacctcagcaaacttcttattcttatattgattctcaataaattggcctcccatttttaatggagagggttaccactactggaaaatccgaatgcaaattttcattgaggcaatagatttaaacatttgggaagccatagaagttggaccttatgtacccaccatggtggctggaaatacaacaatagagaagcctagagaagagtggtctgaagaagaaagaagattagtgcagtataatttaaaggctaaaaacatcattacctctgccctaggaatggatgaatattttaaggtgtcaaattgtaagagtgctaaggatatgtgggacactctactaggtacacatgacggaacaaatgatgtcaaaagatctacgataaatactntaactcatgagtatngaattattangatgaagacaaatgagagtatacaagata

SEQ ID NO: 16582 - DNA, 449 bp, Glycine max
  unsure at all n locations
tgctcttccatattgtgagtctttgctgaaacttgattataactggttcccaagttgatcagagagttggactaaccccgactggcagtcccaaaaagtgaaaaggtggagaagcaaccctgcatgaaaggaaatttgcagctggctcattaaatctttggtttgtgccaatcccataaaagacactcttaaggaagttaactaacaatccagagaccaattcgaagcctcggaatattgcttttattgcccaaagactatcatgagtcacctgtcccaccataactgaatcatcagtgtattggagaattgagtattggaactcttctccaactttcatacctttgaatagtcttttctccaccgtgctatgaaccgccccgttagaccttgagcagctatcaagaacanaaatggagacaacggatcaccctgcttcaagcctctta

SEQ ID NO: 16583 - DNA, 405 bp, Glycine max
  unsure at all n locations
agcttaatctgttttctctgctctttgatcccgtgaaaaaaaaaatggctggagatgaagaaaagcttcgaatagtgtgatgtttccatggctagcctttggtcacatgatcccaaaccttgagctggccaaactcattgctcaaaagggtcaccacgtgagtttcgtatccacccaagaaacatagagcgtcttccaaaaccgtcactaaacacacttgatatcaatttcgtgaaccttccactgcctaaagtccaaaaccttccagaaaacgcagaagccaacactgacatcccctacgacgtctttgaacacctcanagaagcctacgacgttctccaagaaccgctgaaacgttntctcgaatcttccanacccgattgagtcttctacgacttcgctccc

SEQ ID NO: 16584 - DNA, 409 bp, Glycine max
agcttgccttgccccttgatatattcgagggactcatggtcactatgaatgacaaattccttgggataaaggtagtgttgccatgttttcaaagcccgtactaaggcatacaactccttatcataagttgaatagttaagggtaggaccacttaacttttcactaaaataagcaattggatggccttcttgcatcaacacagccccaatcccaacatttgaagcatcacactcaatttcaaaagatttttgaaagtttggcaacgcaagtatgggggcattagttagctgttgcttaagaacattgacagcttcttcttgtttctctccacatttgaaaccaacatatttcttgagcacttcattgagaggtgctgccaatgtgctaaaatccttcacaaatcgtctat

SEQ ID NO: 16585 - DNA, 460 bp, Glycine max
actaagctcgaattgaaaatggaagctctcagaaaacaaattgtcttacttttcactcggattgccgattcaggtgcataacatatcgagacgctcaaaattgaacaacagaagctctcgagaaattcaaatggtcataagttttcacatggatatccgattctgtgttataatatatcgagacggtcgaaattgaacaacgactctagaaattcaaatggtcataacttttcactcggatgttcgattcaggcgcataacatatcgagacactcggaattgaacaatggaagctctcgagaaatacaaatggtcataacttctcactcggatggccgattaaggcgcatcacatatcgagacgctcaaaattgaacaacggaagctctcgagaaattcaaatggtcataacttttaactcagatgtccgattcggggataaaatatatcgagacgctcg

SEQ ID NO: 16586 - DNA, 394 bp, Glycine max
tgtcttagtggctttgtgaagatgaagaggtaaaagtgactcaacaggttgaggtgtgtctcaccattgggagatataatgacaaggtgctgtgtgatgtggtcccaatggaagcgacccatgtgctgttaagaagatcgaggcagtatgataccaaggcagtgcatgatggcttcaccaactacatctctttctagcgagctgacaagaagattgttctcaaaccgttatctcctcaagaggtttgtgaggatcagataaaaatgagagatatgatgaagagtgagacactcgagaggaaaaagagtgagacacttgagaaggataagtgaggaaagagaaagagtgaaacacttgagagggaaaagagagaatacatagagagtgaaacact

SEQ ID NO: 16587 - DNA, 411 bp, Glycine max
ttcttgtcgccacggagttttccgactatgctcttgtgtggtggaacaagctacaaaaggagagagcaagaaatgaagagccaatggttgatacatggacggagatgaaaaagatcatgaggaagcggtatgtgtcggctagttactcaagggaattgaaattcaagctccaaaaactaacccaaggcaacaagggggttaagaagtatttcaaggaaatggatgtgctcatgattcaagcaaagattgaagaagatgataaggtaactatggctcgatttcttaatggtttgactaatgatatccgtgatattgttgagctgcaggagtttgttgaaatggatgatttgtttcacaaagcaatccaagtagagcaacaattaaaaaggaagggagtggctaagaggagtt

SEQ ID NO: 16588 - DNA, 443 bp, Glycine max
ttatatacacaaaccaaggtaccatgagagtgtttcatatcagatacaagaacaatgctgataagaattacacttactccagtgaacacagttatagcatcttcggccttagaaccatcagttggatatgactcacgccatatctgccaaacacctatcacactaaattttggcaaaaactcaaccttcgacatgacatataaattcttagccacaataaaatatttaaaatggatactgtctatttagaggccactataacaaaagttaagagttcttatctcttgttttagtaatgtatcttcttcgcaagcagaagtgaagataatatattaccgtggagcctgcatagagaggggccattaaaccattgaaaaacccatgaacatgtatattatatatgttaaggactgacgtaataaagatatcccaaatgttttaaa

SEQ ID NO: 16589 - DNA, 411 bp, Glycine max
  unsure at all n locations
ttttcatgcaagtttaccagaaatacttttatcaacttttacagattaattttgaaaaaatttaatattcaaattgttggtattttaggatcctggtgaacccataaaataaaaaatgttcaattttgatgaaaatgcttgttgaaagctgttctgagtacgtacttcatactacatgtatgttatttaccatatatgatcaaatgaaataaaatagtaaaaaaaaatgcacatataaagtaatgtatgtgtaaattttgatgtaactcattttattaatttcaaaaattaaattcttattagtaatttccagttgataaataatcttattttatactaatgacttaaataacactttaatttacaaagagctntaatttaattggtttaacaggtgcgttaattattaca

SEQ ID NO: 16590 - DNA, 459 bp, Glycine max
  unsure at all n locations
actcaagctacaagacaaagatggcctcaacaaataccaatcaccttattgaattctatcaatagacctccaatctttaatggagagggttaccactactggaaaacccgaatgcaaatttttattgaggcaatagatctaaatatttgggaagccatagaaatagggccttatatacccactacagtagaaagagttacaatagatggtagttcatcaagtgaaaacataactatagaaaaacctagagatagatggtctgaagaggatagaaaacgagtacaatacaacttanaagccaaaaacataataacatctgccctgcgaatggatgaatatttcagggtttcaaattgtaagagtgctaaggaaatgtgggacactcttcgattaacacatgaaggaactacagatgataaaagatctaggatatatgcactaactcatgagtatgaatta

SEQ ID NO: 16591 - DNA, 414 bp, Glycine max
  unsure at all n locations
agtttcttcatcagaccacttccagggtgctggaactacttcacatggatttgatggggcctatgcaggttgaaagccttggaggaaagaggtatgcctatgttgttgtggatgatttctccagatttacctgngtcaactttatcagagagaaatcagaaacctttgaagtattcaaagagttgagtctaagacttcaaagagaaaaagactgtgtcatcaagagaatcaggagtgaccatggcagagaatttgaaaacagcaggttcactgaattctgcacatctgaaggcatcactcatgagttctctgcagccattacaccacaacagaatgggatagttgagaggaaaaacaggactttgcaagaggctgctagggtcatgcttcatgccaaagaacttccctataatc

SEQ ID NO: 16592 - DNA, 450 bp, Glycine max
  unsure at all n locations
tgtaagatttgcaagatcatcttccttgacaacttccttgaaaaagattgccgtcaatatgaagagagaacaatttagagagtgatcgaagactttcaaatggatttccactgaatttattcatagagagatcgagatatcttaatgatgaaagttttccaaatgatctaggaagagcaccaccaattgagttgttggaaaaaagtaacgtgtcaatatttttaaatgccccaatatgatctgtcagattgcctgaaagtcgtgaactctgaactgcaagtcttgtgagtccatgggaaatacaaggagcaagaatttctaaaagttcattaacctgttggttgagtttgagatatgataaatctatcacccttaagttgcagagattacccanagaagttggaatgtttccttcaagttgattatgtgataaatcaagttcaacaagag

SEQ ID NO: 16593 - DNA, 409 bp, Glycine max
  unsure at all n locations
ttatcccatgcttctttggccgtcgttgcgttggatatcttctcaaatgtatcttcatccaccgattgataaatgagaaagagagctttcttgtctctctttcttgactccttcaacgtctcctttacaccttggcttagcaaggcttcatcttgctcctcaaagtcattctctacgatatcccacacatcttgagctcctagtagcgccttcatcttgatactccaattatcatagttgttctttgtgagcatcggcatttggaaaggaaaacctccattcgccatcttttgaggatcttgaagctctgataccactntgttggaaataaggctntntatgtttaggaaaagtgtttaggaatattggagactntgaatagaaacttgataggaaggagaattcttta

SEQ ID NO: 16594 - DNA, 452 bp, Glycine max
  unsure at all n locations
ntagccgctntaaactctgcatttagttcatcatcttggtttaagacttttactcctaggccatctggaagaggtcaaggatcacaaagagctgcagcagtggctgctctttcacaagttcttacggccgaaaagaaaaaatcacctgatggttctcctgttgctagcaggagtcctatcactcaaggtagcgctactggtaagaaaaacagttcttgtctaaatatgatgttgcattccctgaatacaatgggttggctgggttgaatattttactacaccctattactttggtttatacttttgaaatttgaataattaatataatcctttttgtttagttctaattatttgatattttttaatcataataatagatactgctagtaaactactaagagtggagctctaagcgctacattgatgtactactaaggggtttattgagattc

SEQ ID NO: 16595 - DNA, 463 bp, Glycine max
  unsure at all n locations
tactttagctagatgggtcgattgccaaacataaagctaggctggtggctattggattcatgcaacaagaaggtttagactatactgaagtatttgctctagtagcaagattggagactgtaagattgattgtttccctggctagctggagaaattggaaactgtggctactaaatgtcaagtcagcctttctaaatgggccacttgatgaagaagtttttgtggtacaacctcctggcttcatatgtaaaggtaaagaacaaaaggttttgagactgaagaaggccttgtatggcttgaaacaagcacctagggcatggaacaaaaggattgattcctttctcactggttttggctttcagaaatgctcagttgagcatggtgtgtatatcanaacagtaagtgaaactaagattgtggtgctatacttagatgatgatgatttactcatcactgatagtag

SEQ ID NO: 16596 - DNA, 406 bp, Glycine max
  unsure at all n locations
agcttttcactctatctatttttattaaaactcacataagacgataatgtgtatctattttaagaaaaaatgaaatttttaaaaatactattcaaccttccttgtgttatttgtctatgcacaaataatgtaaggacataaatagctcactagaaatgaagcttccatttgaacttcatttgaaatatataatttgtctttaaatacaaagaaatcacgttttctcaaaaattaataaataagtaaaaatgaaaatgacaaaacaatcttgttcccttttaattnttctttctccttttcaccttttcactaaatcatgtatttaattaatataattaattatgtaataaaaataaaggcatcctanaataaaggtctagtaataatcactttagatgcacttctg

SEQ ID NO: 16597 - DNA, 402 bp, Glycine max
ttcttggatttccttttagtagggaatctatccttcctaagatggagccaaacccagtcaccctcattaagaactagctcttttcttcctctattgcctttagttgaatacacctttgtttggttctctatttggttcttaaccctctcatgcatcttctttacaaattctgacctagattccccttctttatgtataaaagaagtgtccagtgggaggggaatgaggtctaacggtgttaggggattaaacccatagacaacctcaaaaggggactgcttggtggttctatgaacccccctgttgtaggcaaattctacatgaggaagatactcatcccaagacttatggttgcctttcagaagagcccttataagggcggataaagacctattcactacc

SEQ ID NO: 16598 - DNA, 397 bp, Glycine max
tagtttacaaaaacaggttctgaggatcttgttgatcctaccttgtatcgttatgtggttggtgctctacattatgctactatcacacatccaaaaattagtttctctgacaataaagttttccaatttatgagtcagccaacagaacaggattgggttgctgtcaagagaatccccgggtatctaaagggcacacttcattttgggctgaaactggaacccaatttttctacaaagcactactctgttcatgccttttgcgatgctgactgggcttcagaccttgatgatcgaagctctacctctggggctgttgtgatcttacgcccaaatcttgtctcttggtgatccaaacagcaatctgttgtggccaggtccagtactgatgcagagtaca

SEQ ID NO: 16599 - DNA, 453 bp, Glycine max
gtcatcctatccaaaatatccaatgcttccttctacttgactctctcttacagaaactttgaatgacagatgtataagtgacaacatttggagtacaaactccacctttctccatttcatccaacaattgcaatgctctttccatagacccagacctacaaaagccatctaaaatggccgataaaatcaccaaattgggcgaacatccatgtagtctcataaccttaagcacagagtaggcctcctcagatcgacccgcgttagagaatccctcaactattgccatatacgtaataagatcaggacaaaggccattggaactcatctcactggtcaacttcagagccgtttcaatgtcacccttcttgcaacacaaccttataaccagattatacatgacagtgtcagcgtggaggttgaaagtgtcctccatcttcctcaacacccacagag

SEQ ID NO: 16600 - DNA, 415 bp, Glycine max
agctttgatggtgtcgagaagaaatcacatgtttgtcatcatcaaaaagggggagaatgtgaatgtatgtatacatgattttgatgatgtctaaagaagaatcaaacaaggctcattttgcttcaagattaatacaagattgtttcaacaaacaaagccttgattcaagatttcttcaagatcaagccttgcctcaaaatgtagagatttcaagtcatccaaggcacatgtaatcgattaccaatacatgtaatcgattaccaaggcacatgaaagtgtgtaatcgattacacatcatatgtaatcgattaccatagactctgaacgttgggaattcaaattttaaatgaagagtcacaactgttcaagataaacaattgtgtaatcgattacactaattctgtaatcgattacc

SEQ ID NO: 16601 - DNA, 436 bp, Glycine max
  unsure at all n locations
tactaagcttgttgggcatgccgggttctacaggcgattcataattgatannctaaangtcgccaaaccacttagcagtttgttgaataaagatgttgctattttgtttaatgaagagtgtatggatgcatttaatgatttgaacaccagattagtgtctgctccagtaattatagcaccaaattgggggcaagaatttgagctgatgtgtgatgcaagtgattatgccatatgtgcagtgcttggacaaaggaagggaaaaaattttaatgctatatactacgccaacatggttctaaatgatgcacaagtgaactattctaccacagaaaaagaaatgctggtaattgtttatgcacttgtaaagttcatatcttatctggtaggctcaagagttatcatctacactgatcacgcagctattacatatttgctc

SEQ ID NO: 16602 - DNA, 338 bp, Glycine max
atttttggagatatcaagtgccaacacgacatcttcttttgaccagacatcatctggctccaattcattagcgggcctaacttcagtgaccaacatcatgggatgtacccagcctttgatgaccgctttccaagttctgctatccagagatctgaggaaggccaccatccttgctatccagtattcataacaggatccatccagaatagagggtctgtaaactgatccaccttctatcaccatgttcaacagacaagatctccctagatctcactcacagataccgagtgccacgactgataccaatcgaaattatgataccaaagccacatgacgta

SEQ ID NO: 16603 - DNA, 380 bp, Glycine max
actcggccttcttctatgatcagattgggaatgcctctaacagcacctttgtcaatgattatcttcatgcctcttaagtgcatatgtccaaatctttgatgccatatattgacttcatcttctttggagactagacatgtggaggagtaactggtttcttgaggtgtccatatgtaacagttgtcctttgatctgctgcccttcattatgacttcactcttctaatttgtcaccaagcattctgactttgtgacagttacattgagtacttcatgacacaactgactgatgctgatcaagctctcagtcagtccctttaccagcagtactttgttcagactaggaagtccttcatggactacctgtaccattccagtgat

SEQ ID NO: 16604 - DNA, 425 bp, Glycine max
  unsure at all n locations
tctatagaaggttcattcctaatttctctacatttgttctcctctcaatgagctggngaagaagaatgtggcatttacctgtggtgaaaaacaagagcaagcctttgctttgctcaaagaaaagcttactaaggcacctattctagctcttcctgacttttctaaaacttttgagctagaatgtgatgcctctggagtgggagtcggagctgtattgttacaaggtggacaccctattgcttatcttactgaaaaactttatagtgccaccctcaactaccccacctatgataaagagctctatgccttaataagagctctccaaacttgggaacattaccttgtttccaaggaatttgtcattcatagtgatcatcaatcacttagtacattagagggcacagcaagttaaacataaggcatgc

SEQ ID NO: 16605 - DNA, 400 bp, Glycine max
agcttattccaagccacgattgatcagatggatactgctgcttcaagaatttgatttagtcatcaaggacaaaaaatgttctaaaaatgtggtagcagaccacctatccagattggtgaatgaagatgtcacttcaaaagaggttgaaataagagataaatttcttgatgaatctttgtttctgattgcagggagaccctggttagctgatatggctaattacaaggcagcaggtgtcataccaaaagacctcaattggcagcagagaaagagattcttctatgatgcacacttattcaaagtaagtgtagataatctccttcgaagatgtgtgacaagtgaggaggccgacggcatattgtggcattgtcacaattcaccatgtggcgggcattatggc

SEQ ID NO: 16606 - DNA, 445 bp, Glycine max
tctcgtcatgactgttggattaaggcgatgcttactgtgttacatgctcttcaacagaaccaaacttggactcttacctctctaccaccacataaaacaaccattggttgtcgctaggtttacaagataaagtatcatgttgacggctccgttgaaaggtacaaagcacgcctagtcgcgaaagggtatacccaaatggaaggtttggactttctagacaccttctctccggtagcaaaactcaccactgtgcgtttactcctcgccctaactgcacttaataattggcacttacgacaactagatgtgaataacgctctccttcatggcgagcttaatgaagaagtctacatgcacattccttagggtctttctgtggataatcctcatcttgtttgtcgccttcaacattccttatatgggctcaaacaagccagtcgacaat

SEQ ID NO: 16607 - DNA, 399 bp, Glycine max
  unsure at all n locations
agctttattcccctaggcaattgttgtagtggtttatcaccaccagaatgttgttgtagcagttttatgcaaccagaaaattttctctgctgtcattgttagagactaaagcttaactttcaagcatgtgtaagaactaaaatttacaattttctcgaaactaaactataaaatggaaacaaccaagggggaagatgaataatttaacatcaattataacataccttttgaaaattagtctccgcatcattttcttcttccgccttgatgatatctgtgaggtggtcaatcaggttcaactcccacgtatttttctgattaattntctgcaagcacacaaaataaaaaaaataaaaaaattatttcttctttttgtttttttttgtggggggggggggg

SEQ ID NO: 16608 - DNA, 337 bp, Glycine max
  unsure at all n locations
tgtttccattatgatgaaatcctcccaaggagaggacccatcaccaaagccatggctaggagactccaagaagattcggccagaaatacaggagaaggtcctanagttctcatgagccttacggtagattctgngtcaatggactaagtatgagaccacttatttttgtacatattagtttagggtttcattatttttgggtcttgtatttacggctccatagtgtagggagggtaccctaataatgtaggatttttcaacccttgtattttagggcacttgactagttttgtataagggtagttttgtaatttacatgcattaagtgcactatttg

SEQ ID NO: 16609 - DNA, 389 bp, Glycine max
ttcttctatgaactacaattatgaatagagaattggcggtaaggatgcaacttcaaataaacccattggccttctgtgaatgttttgtctgtgcgcttaagattgctctgttgggtcatacgattccttgctcgaatgagatttgttttcagtagctacaatatctctttcttttgagaaagtaattcctctaacaaagaaattttggacacactaagtacatgggaggcaatacaaggaggcaatatgccatacaacggttcacatagggacatacctatggctgaatgataggaggaattgtaccaaaattcagccaatgggaggaaacggatccaccattgtggttcatcactcacaaagcaacacaagtacgtctttaaacatct

SEQ ID NO: 16610 - DNA, 407 bp, Glycine max
ttgcttgcaaacttgatcatcctgagataataggtggtcattctcattcgaagtggatggtgcaacatatttctttggcctaatactaacttcaacatttttacagcttctaatgttatgattggtttggccacaccttccacatgtaaactcaaccaatttcctctttaacttatgtactgagacattggcctcatgtacagatctccttctatatttcattggccttcctgtatggacccttttatgtggaggaacagggcgagtatattgagtctgggtccaatattgcggtccttggactgggtcaataaaatgctggtatgtcttatgatagacttctattgacagccactcatgacacgtgtcctcatgcttccctcctttgagagttattgccgcaatgg

SEQ ID NO: 16611 - DNA, 374 bp, Glycine max
  unsure at all n locations
gcatgatcaagacaatgcctattgaacctgatttatttgtgtggggtgcattgctggctgcttgtagaaatcataggcatgtggagctcgcggaagtggctgctatgcatctaatggaattagagcctgagagtgctgcgaaccctcttctgctgtccagcgtatatgctgatgctggcaaatggggaaagtttgagagggtcaagaaaaggataaagaagggaaaactgagaaaacttcaaggtttgagttggatagaaaatttataacattatangtacgttggttggtagaggccatangttttgcttcttcatgaagagaagggcacacctactggtataatttttgatgtatcgnttgtgctcctcatg

SEQ ID NO: 16612 - DNA, 458 bp, Glycine max
  unsure at all n locations
ntggagtaaaaggcttactaaagaaggcaatagggtgttctttctgcgataagactgcacccatgtcgacaccaaacacgtttgtttccaaggaaaaagggataatgaagtccggcaagagtaaagtaggggctatagaaagcacatccttcaatccagtgaaaacttgttgcgccttagatgaccactcaaaggggtacttcataagtaacctggttaaataagctgcaatggaggcatagccacgaataaatcggtgatagaaacccgagaggcccaaaaaactgtgcaaggccttggaggaatgaggtgtgggtcactgctaaatggcttggaccttagccgacactggttcaactccttgtgcaaaaaccaggtgacccaagaactcaacttgttgctgggcaaaggtgcacttggatagtttgaggaagaactgaccatctagaaggacctga

SEQ ID NO: 16613 - DNA, 447 bp, Glycine max
ctatagaaactcagcttgaaatgggaatgcactagcatcctactctttctccaaactcgaaggtggaggacacatgaacgaaaacacaattcatggggctccgaaaaaggggttgagaatggagaattacactaagcaatcactacgcatagctccaaactcgaaggtggaggacacatgaaagataacgcaattcatggggctccgaaaagattgagaatggagaattgcactacgcaatcactacgcatagctccaaacgcgaaggtggaggacacatgaatgaaaacgcaattcatggggctccgaaaagattgagaatggagaattgcactaagcaatcactacgcatagctccaaactcaaaggtggaggacacatgaacataacgcaattcatggcgcttcggaaagagtgagaatggagagaggaactaatcaatcacta

SEQ ID NO: 16614 - DNA, 409 bp, Glycine max
  unsure at all n locations
tgtttggacttcctgtgttttgggaacctctccttcctcaggtgtacccaaacccaatcacttggttcaagcacgactttctttctgcttttgttggcttgccttgcatagctcgcatttttcttttcaatttgaaccttcacttgctcatgcaacttcttcatatactcagctttagcctgtgcatccttatgcttaaacatagcaatgttaggcataggcaacaaatcaagaggagtcaaaggattaaatccatacactatctcanatggtgaacaattagttgtgctatggacagcccgattataagcaaactcaacatgaggcanacaggcttcccaagatttaagattnttctttaaaacagtcctaagcagtgtgcctaaagtcctatggactacctcagttt

SEQ ID NO: 16615 - DNA, 446 bp, Glycine max
tgtggaaacaaaaaagtgcaacacatttgattagtttataggcttctgaagttggctttagtcttgccggtagcaactgcaagcgtggtacatgttttttcagctatgaagtttgtgaagagtcagctatgtaacaaaatgggtgatcaatggttaaatgatctgaaattctgatactggggacagatgtcgtacaggatgtcacgacatcgcgcttcagaacatgcagattatatgtgtgtccgtatgaacagattaaacaagtaaataacacatgagaattgttaacccagttcggtgcaacctcacctacatctgggggctaccaagccagggaggaaatccactaaaatagtgttagttcaaggtctaacagccactgtttacaaccttctcacctaaccactacccatgcgacctctacctatgagccactcttagatatg

SEQ ID NO: 16616 - DNA, 447 bp, Glycine max
  unsure at all n locations
ntggagtaaaaggcttactaaagaaggcaatagggtgtcctttctgcgataagactgcacccatgtcgacaccaaacacgtttgtttccaaggaaaaagggataatgaagtccggcaagagtaaagtaggggctatagaaagcacatccttcaatccagtgaaaacttgttgcgccttagatgaccactcaaaggggtacttcataagtaacctggttaaataagctgcaatggaggcatagccacgaataaatcggtgatagaaacccgagaggcccaaaaaactgtgcaaggccttggaggaatgaggtgtgggtcactgctaaatggcttggaccttagccgacactggttcaactccttgtgcaaaaaccaggtgacccaagaactcaacttgttgctgggcaaaggtgcacttggatagtttgaggaagaactgaccatcta

SEQ ID NO: 16617 - DNA, 404 bp, Glycine max
  unsure at all n locations
agctttattaggattcttccctcttagtcatgtttctttccatctacaaagacttgaatttgagaatttacttaggaaatctaatatcattctcatcaatgacttataagtgatctcgtgtatatatatatatagtggtgtgtgtataaaatatagtcatctgtcactattttcatgccaacaatatagtaccaaatagataattaaattacaaaaattaatgaggttaataattatgtagatgatgtaaaaatttcttaaggggtttcctagactatcaatgataggaaacaacaggatcttgaaacctatggttctcacaaacaatcaataaacaacaatagataatgatgtgtacctttctccataggaagacttgtnacttctccatangaacttctctc

SEQ ID NO: 16618 - DNA, 462 bp, Glycine max
  unsure at all n locations
actacgctaagctcttaactgcacaagctctaatattgtgttatccttgtggaaccttcacttgatgaagacactgacaaaaacttatcttctcctttgtggacaaagtgtgacaagcctgnggcaagtaaattttcttcccatcagaccttggatgcaactgtgctcgtatccccatgtcagctagatcttgacggatattcaagccatccttcgtcttgccttgaatgtttaggagcgtcccaatcacattatcacatacatttttctccacatgcataacatcaatacaatgtctaacgtccagatcagaccagtatgggagatcaaagaaaatggacctcttcttccatatgcaagtcttactcttatccttcttttgggtctttccaaatacaatattcaggtgttgaacccgctggtatacctgttcaccagtcaacagtatcggtgcaatatcgt

SEQ ID NO: 16619 - DNA, 447 bp, Glycine max
gtaatgtttcaagaatgtccttatgtatattatatacattgttatgctcatcaattacaacttgctcttgttgcttcaactagatgggtagttgatgtacgcgcttttttttaaacttgaatatgattgtaaatgttgtgtgttcttcttgtaaacacaatcatgagttacaagttgcttatgtaactaaaatttctcatttgattgccaatgatgagattgatattggaaggggaactaatcaaattgacacattacagagactgggagataccagatggagttctcatttcaattcgattggtattcttttatgcatgtataatgcatctacagcagttcttgaagaattagctgctaaatgatctactgctactcaatgaggtatgctactgattggccaaaagcatattgtcatttgatgtattttactctatatgtatgaaa

SEQ ID NO: 16620 - DNA, 412 bp, Glycine max
  unsure at all n locations
agtgagctgatcatttgtagccagtgatgagaagaggaaaggttgcgtantgaacttaccttaagttttgtcaaggaagaaagattagtcaaccactctgcatccttagatttgacatcaaaattgccaccaagtccaagagtgtgcaacaaaggaagattcccaacctggaaagggagtgctcccgaaaatgaattctcaccaagatcaagatacctcaactgtgagagattttcaagttgatatgggagttccccatctagatcattatcacttagatcaagatattgtaaatgcgtaaggtttccaagttgataagggagttccccatctagatcattatcacttagatcaagatattgtaaatgtgtaaggtttccaagttgataagggaattgtccatggagataaa

SEQ ID NO: 16621 - DNA, 410 bp, Glycine max
  unsure at all n locations
agtcttcccaatgtcttcaagcattaaatcaatacaatgagctgcacaaggagtccaataaatgtttccttttgtcctctaacaacttacctgctaaaacatagttgctcccattatcagttacaacttgaacaacgttctcttccccaacttcctccacaatagcatcaagcaactcaaaaagcttttcacctgtctttacaaaatcagagtcatcaacagacttcaaaaacattgtaccaacttgagagttaataaaaaactaatgatgcatctttgtttccaatcagtccatgcatcggacataatagtacaaccatacttgacccattgctccttgtggcctttcatcaaattntcagtgtattcaacttccttcttcaggagtggaactctgatgtcatgatagc

SEQ ID NO: 16622 - DNA, 399 bp, Glycine max
agcttttgaaacagttttgagatactgcttgcctcataagccctgttaggccttcagccactaaatcaaagagaaaaggggccaaaggatctccttgtcgcagccctctttgaggtttaaactctgaagtagggcttccattaacaagaatagagatggaagctgaagagaagcaggcctttatccatctaatccatctctcatgaaaccccattctcttcatcatataaatgagaaattgccacgaaacagaatcataagccttctcaaagtctaccttatagaccatacaagacttcttggatcttcgagcctcctcaatcacctcattagccaccaaaactccatgaagcaaatgtctgccttttatatatgttgtctgcctttcatctataagac

SEQ ID NO: 16623 - DNA, 456 bp, Glycine max
  unsure at all n locations
tagacgaagaacaagagaggttagatgtaaaagaatagatacgcgagcaaaatagggttcgcatctgatataatttaaaatgtaagtccaacatcagttttcaataaataaataaaaatcgatgttaacaaaatgatgttaacattaacatcggttttctgcaagaaaccgatgttaacttatcacacattaacatcaattttctaaaaacccgatgttaacgaacttacgttaacatcggttcttccaaaatcgatgttaactaataaatgttgacatcggtttttcaagaaccgatgttaatgaaaagtcacttcattaacatcgaattttcaaaaaaccgatgttaatgaatacacattatttgcaattatgtcaccgcatttatcttaacatcggttntgtcaaaaatcgatattaatttgccgatgttaaatctgctntgtgtagtagtgt

SEQ ID NO: 16624 - DNA, 450 bp, Glycine max
tctttgagaaaaatttcttgagaagctagagtttagttacacacacacctctcataactaagctcacctccttgagaagcttccttaagaggattcctaaagaagctagagcttagctacacatacctctctaatagcaaagctcacctccttgagatgagaagctagagcttagctacacaccccctataatagctaagctcacccccatgacaaaatacatgaaaatacaaaaaaaatccctactacaaagactactcaaaatgcctcgaaatacaaggctaaaaccctatattactagaatggccaaaatacaagacccaaacgaaaggaaaaacctattctaatatttacaaagataagcgggctcatacttagcccatgggctcaaaatctaccctaaggctcatgagaaccctagggccttcccttggatctctggtccaatct

SEQ ID NO: 16625 - DNA, 401 bp, Glycine max
  unsure at all n locations
agctttgaaggcatctacctcttgaagaggcagaggtaagggcatagggataagtggtagaggtagaggacggggagatcaaacactattagaaaatacactttcaacatcggttatttggggccttctacatcggttgtaaaaccgatgttgaaagcatcgatgttgaatgtattgttgttaacatcggttttaaaaactgatgttaacataaaaatattaacatcagttttataaataaccgatgttataaagaaagaagtacaacaaaataagtgtatgcgtgagggacgttggcatcagttttctgtaaaaaccgatgtgaatatgttatattaacatcagttnttagaggaaaccgatgtgaacgttcatcattcatgcacctattntgctatagt

SEQ ID NO: 16626 - DNA, 396 bp, Glycine max
  unsure at all n locations
tcgcaatgctntcactgattgcggtagaggcctctcatgaatagcctgtaacttttctgggactggttcaactccattgccggagacgagatgtcccaggtactccagttgggactgggcaaaagcgcatttgggtcgtttcaaggagaacttccctgaaagcaagagcttgaacgctgtttcgaggtgacccacatggtccgccatggttttactatagaccaacacatcatcgaagaagacgatgatgaatctgcgtaagcagggctgaaagagctgattcatagtagcttgaaaggttgatagagcattacacaaaccaaagggcattactcagaactcgtaatgcccttgatgggttctgaattccgttttgtgaatatcatcatctttcat

SEQ ID NO: 16627 - DNA, 390 bp, Glycine max
tcgcaatgctttcactgattgcggtagaggccactcatgtatagcctgtaacttttctgggactggttcaactccattgccggagacgagatgtcccaggtactccagttgggactgggcaaaagcgcatttgggtcgtttcaaggagaacttccctgaaagcaagagcttgaacgctgtttcgaggtgacccacatggtccgccatggttttactatagaccaacacatcatcgaagaagacgatgatgaatctgcgtaagcagggctgaaagagctgattcatagtagcttgaaaggttgatagagcattacacaaaccatagggcattactcagaactcgtaatgcccttgatgggttctgaattccgtttgtgaatatcatcatct

SEQ ID NO: 16628 - DNA, 342 bp, Glycine max
tagcttgttaacccatggaagctcctaatatctcccacactttttggggtgggccattcttatatggccttgattctctcagggtccacttggaccccatttctaccaactacaaacattaataaaactatattatctacacaaaaagtacacttctctatattggcatagagagtgtttatcctaatgactgaaagaacttgccttacatgtcctaagtgatatatgctcttactatacactaaaatatcatcaaaataaacaactacaaatctacctataaaatgccttaatacatgatgcataagcctcataaatgcgcttgttgcattattgaaccca

SEQ ID NO: 16629 - DNA, 400 bp, Glycine max
  unsure at all n locations
agcttattgccacatcactgcactcattttgaatatgtgctgaaattaaagcagtccacatcacagtgcttttaaggttagaaaactccgacataaaagaattcgctaccacataaaagacccctcttcactatagcacaatggatcagcattcctaaaattaccttggcagaacccttgcaaacatctatgaggcttgcaaatgtaatctcagatggcttcagtcccaatatctgcatctcataaagaagattaatagattcttttgtgttttttagagcatatcctgcaatcagagcattcacagagaccacactctgctccggcatgctagaataaattntatgtgtatcttcgatgtccccgcactttgaatacatgtcaataagagaacttccag

SEQ ID NO: 16630 - DNA, 388 bp, Glycine max
agctttttcctatggctgaggccaaatgcagtgttaacttggtttgaatttgaggaccttatgagggccaccgacaatttttcacctcagaacttcattggaagaggtgggtttgggttggtttacaagggcattctacctgatggctcaatggttgctgtgaaaaggcttgaagaatcagattctcaaggtgatgctttgttctgcagtgaggtggagattgttagcaacttgaagcaccgaaatctggtaccgctaaaagggtgttgtgtggttgatgaggggaatgataatcacaattctgagtacggaagaaggtatctagttcatgaatatatgccaaatggtagccttgaagaccatctctttccaaccaaactagacaatc

SEQ ID NO: 16631 - DNA, 414 bp, Glycine max
tgttaagctctcaaattgttacaaataaaatataagcattctattatttttcactcgtcagcttgacggttcagtgattttacctgtatttcattaaattttttaaattattttataagcaatttccaaaataaataaaatagaagcaaacttatttcatgctggaactgtttgataattcagatgaaactgaacactttaacttcagttaagaaaccactgcccatgctatatctgtattggaacatattctacaaatttaactaaatacatatatttttaatatgctgcatgtaaacttacatgtctgacttccgacccaactgtttctgtggtaaaataatttgcaccgaatgggaatcatcagtgctggggattgggtgactcattatggctattgctcttgcaacccta

SEQ ID NO: 16632 - DNA, 402 bp, Glycine max
agcttgaggggctcttctctgagaagattctgcagacaaaggaaaacagaaaattttgaacaaattttcaaaactctggctaaaatcatctaaaaacttcaacatagcaaaagtaagtaactgacattgctaaagcatgcaagaacccgaggaacaccctcacttggaccatcaatgccaggaatgaaatccattcgaggtccaatccagttaaaaggcctcacaattgtgaactccaagccattttcagcaccctcagctgccaataatcacacatcagtgagaattaacaaaattgaaaaagaaaaaaaaaaacaacacctaaacaaaaacaaatcaaaactcaccataaatcagcctctcaatcaactgtttcgcacaggcataagaccacctctgttt

SEQ ID NO: 16633 - DNA, 431 bp, Glycine max
  unsure at all n locations
atactcaagcttgcagaccagtgatntgtttgaggtaacaaatccgggatgctgttgcatgtagacctcttcctctaagatgccattaaggaaggcattgttcacatccaactgctgtattggccagttattagtgacagcaagagtaagaagaagtttcagtgataggcttgataactggtgagaatgtttctgtataatcagtaccaaactgctgatgaaagccttttgccactagtctagctttgtacttatttacagtaccatcataattttctttgacccgaaacacccacttgcaaccaatatgattactatcaaggctccatgtattgtttttaatcaaggcatcatactcagtttgcatagcagccaaccatgtagtatcgctaaggcttgtttagtagatatgggttccaaatgagtcaaaa

SEQ ID NO: 16634 - DNA, 412 bp, Glycine max
tgtaatcgattacacacatactataatcgattaccagattatattttcataaaatattctcaattgtcacatcttttcatttggttcttgaatggctatcaaaggcctatatatatgtgacttgagacacgaatatgctaagagtttttaagaacaaaaaggtcttatcctcttaaaaagcaaaatcgtattatcctcttacaaattccttggcgcaaaacacttgtgattcaataaggaattatttgagtgctcaaattgttcaatctatctctttcaagagagatttcttcttcttttcttctttattctgaaaagggattaagagaccgagggtctcttgttgtgaaagaattctaaacacaaaggaaggattgtccttgtgtgtataaaacttgtaaaaggaatatac

SEQ ID NO: 16635 - DNA, 319 bp, Glycine max
agccttgcccgcatgcctgtccaacatctggtccatgaacggcaaaggagaatgatctttccttgaggcttcattgagcttgcggtaattgacgcatattctcacaaccaacgataaacttcgttgggattaggacattcttgtcattgcaaatgactaccgtaccccctgtattcggcaccacctggactacgattacataaccactgtgggaaatggggtacatacgcccaacactaaaaagctgaagcacctgtttcctcacctcttacttcattgatggaggaagcacttgtatgaggctggctgactggtctat

SEQ ID NO: 16636 - DNA, 422 bp, Glycine max
tcttagggcatgccgggttctacaggcgattcataaaagatttctcataggttgccaaaccacttagcaatttgttgaataaagatgttgctattttgtttaatgaagagtgtatggatgcatttaatgatttgaaaaccagattagtgtctgctccagtaattatagcaccaaattgggggcaagaatttgagctgatgtgtgatgcaagtgattatgccataggtgcagtgcttggacaaaggaagggaaaaaattttaatgctatatactacgccaacaaggttctaaatgatgcacaagtgaactattctaccacagaaaaagaaatgctggtaattgtttatgcacttgaaaagttcagatcttatctggtaggctcaagagttatcatctacactgatcacgcagctattaaatat

SEQ ID NO: 16637 - DNA, 441 bp, Glycine max
aatactcaagcttgttagatatgcacgatcatcttccttgacaactccgtgattaagattgccgtcaatatgaagagagaacaatttagagagtgatcgaagactttcaaatggatttccactgaatttattcatagagagatcgagatatcttaatgatgaaagttttccaaatgatctaggaagagcaccaccaattgagttgttggaaaaaagtaacgtgtcaatatttttaaatgccccaatatgatctgtcagattgcctgaaagtcgtgaactctgaactgcaagtcttgtgagtccatgggaaatacaaggagcacgaatctctaaaagttcattaacctgttggttgagtttgagatatgataaatctatcacccttaagttgcagagattacccaaagaagttggaatgtttccttcaagttgattatgtga

SEQ ID NO: 16638 - DNA, 393 bp, Glycine max
agcttcttgcagttggacaacagtggttagcctctcgaaatctccacctaagtagtgtttgattctaatgccattcacagtccatgtccttttggtggttgggtcctccaatatcattgctccatgtggcataacttttttgatgaagaatggtcaaaccacttgcacttcagcttacttggaaacaatgttaatctagaattaaataacaatacttgttggccaagctgaaaattcctttttgacaactttttgtcatgatagattgttactctttgcttataaagattggaattctcataagcttgaaccctcagttcctccaattcatggagttgaagctctctgtgttcaccatttgcattcgagtcgaagttcacaaattataatgcc

SEQ ID NO: 16639 - DNA, 379 bp, Glycine max
agcttttggcaaatgaagaagaagaagaaattcaagaggatgttcaaagagattcaaaggatgtaacagattgtaatcaatgtatttaaaatgcaagttaagttcttgcctttatagactcttcaagtctggtcaagaaaaccattacaagagttataacctttagaaaacctttggaagagttacatcttttgatttttattcaaaacttatcattggtaatcgattaccaaatcattgtaatcgattatacaaagcatttttgtaaaacgatgtgactcttcacatttgaatttgaatttcaacgttcaaacacactggtaatcgattaccaatatattgcaatcgattacaccattatgaaattgaatggaacatt

SEQ ID NO: 16640 - DNA, 251 bp, Glycine max
tagcttcatagaagtgtatgtggctcgaaacatagcatcgatgcactggtacttgacgttatatgacttaatgatcaactcaggattcaacagatgtgacatggaccatctctgccgcgctaagatatatactaatagctatgccatccttgtcgagtatgtggatgacatgaatattacaggatctcgtatggcacaaatgcacaggttgaagcaccaattggcagaaaactttgatatgatagatcttg

SEQ ID NO: 16641 - DNA, 394 bp, Glycine max
tcaagcttttagccaactcaaacgataataactttttactcggatgtctgattgagtcccgtaacatatcgagacgctcgaaattgaatgttgaacctctgagccaattcaaacgacaataacttttttcacggatgtctgattgagtcccgtaacatattgagacgctcgaaattgaatgttgaacctctgagcaaattcaaacgacaataactttttactcggatgtctgattgagtcccgtaacatatcgagacgctcgaaattgaatgttgaagctctgagccaatacaaacgaccataactttttactcggatgtctgattgagtcccgtaacatatcgagacgctcgaaattgaatgttgaagctctgagccaatacaaacgaccata

SEQ ID NO: 16642 - DNA, 395 bp, Glycine max
agcttgaaggtatactagatgccttggttaacttggtaacccagctggccttgaataaaaaatttgtacctgtcgcaagagtctgtggtttatgctcctctgctgaccaccatacagacctttgcccttctatgcagcaacctggagcaattgagcagcctgaagcttatgctgcaaacatttacaatagaccttctcatcctcaatagcaaaatcaaccacaacaaaacaattatggcctctccagcaacagatacaatcccggatggaggaatcaccctaatctcatatggtctagccctcaacaacaacaacaacaacctgctccttccttccaaaatgttgttagcccaagcagaccatacattcctccaccaatccaacaacagcaacat

SEQ ID NO: 16643 - DNA, 418 bp, Glycine max
  unsure at all n locations
tgtaatcgattaccagagcagattntcagaaaatattctcttcagtcacatctttttatgtggttcttgaatggctatcaaaggcctacatatatgtgacttgagacacgaatttgctaagagtttttcagaacaaaaaggtcttatcctcttataaagcaaaatcgttttatcctcttacaaattccttggctaaataacttgtgattcaataaggaattatttgagtgctcaaattgttcaatctatctctttcaagagagatttcttcttttcttcttcttcattctgaaaagggattaagagaccgagggtctcttgttgtgaaagaattctaaacacaaaggaagggttgtccttgtgtgtttagaacttgtaaaaggaatttacaagatagtggaactctcaagcgggttgc

SEQ ID NO: 16644 - DNA, 402 bp, Glycine max
agcttgtgaatttattgtgcttggtgactaattggtgcagaaaaacaaagtaaagctcaaagaaacaaaattgaagaactgaagtagctcgctcagcacgtcttaggcgcttagcgcaacacagtggcttagcgggcaacagaagcttagcgtcaagaagtatggagaagtctggaacatgaaggcttgcttaacctgcagctcgtttctatgtttgggatgatccccacttattcaagattggagcggataatctattgagaagatgtgttaccatggaagaagctagaagtatattatggcattgtcacaattctccttatggcagatactacagtggggataggacaactgctaaggtgctacaagctgaattttttttgccttctatcttcaaggatg

SEQ ID NO: 16645 - DNA, 420 bp, Glycine max
aagctccttcaactgcacaaggctatcaatataagaagagtatgcttgtggaaccttcacccgacgaagacactgacaaaaacttatcttttcctttcctgacaaaatatggaacgctatgtgcaagtaaataatcttcccatcaaaccttggatgcaactgcgatcgtatgcccatatcagctatatcttgatgggtattgaagccatacttcgtctagcattgaatgttaaggaacgttccaatcacactgtcacaaacattactgtgcacatgcataacatcaatacaatgttgaacgtaaatatcacaccataacggaagatcaaagataatggacctcttcttacatatgcagctattactttcatccctcttttgagtctagccaaatacaataatcacgtgtggaacccgctc

SEQ ID NO: 16646 - DNA, 405 bp, Glycine max
agcttttcacaaacttactctcttgcttgaccattaaccaccctccttagcttctgccaagactctgcaattggctcattaaccatatcaccaccaccagcatactctccttctcccaacctatcttctcttctcctctgcactatccctaatttacaccaccacttaccccacttgcgaaacctgttcaatcccttttggccatccccatatgcagcatcacaagcatcatccttagaagcagactccattacactatcagatagaacactattggacgtttgcaaattcgcatccctcaaatcattctcagttatcaatacctttgccccatagaacaactcactggaggcaggggaaaccttagcattagatatcactctcaattcatcaacatcccccatt

SEQ ID NO: 16647 - DNA, 400 bp, Glycine max
agcttgtttatttcatcgttgtttaccaagctgctcaatggtctggctatcttggagaagtccttgatgaatcttcgatagaaacctgtatgtccaagaaaacttcttatacccttggcatttactggtggtggtaacttctcaatgacatcaatttttgctttttccaccttaatgcctcaggttgaaattttgtggcccaacactatcccttctcaaaccatgaagtgacacttctcccaattcagcaccagatttatctcaacagatcttcatagcaccggctctagattcatcaagcaacaatcataggaaggcccacaaactgagaagtcatccatgaagacttctatgcacttctctaccatgtcagcaaagatggctagcttgcacctttgga

SEQ ID NO: 16648 - DNA, 396 bp, Glycine max
agctttattttggctcattacctgtcataggcttcttttaaaggctcggctcggcttacataagagtatgccttgacctacgagcctatttaaaagtctacttaaagacgtatttaaccaattaattgttttaaaacctagtaaaatactaactaagaaaaaaaacttataaaatttcctgtacaaatccaaaaataattgataaacaaaattatattgaattcaagttatttaaacacaaagtatatcaaaagaaaatgaaaaaaaaatgcataatattaaaaaatatatggattagagatgatttatactaatatagccaaataaaaatatttaaattatttgaaaatgtctttacaaaacattattgtctttgaaagtattaatctcgttgca

SEQ ID NO: 16649 - DNA, 394 bp, Glycine max
agctttatctcacctactattcgggttatgtacgcaaaacgatctggctgcaatcctctattcagcatctcatcaaacaattccttagccattggcaagttccccaacttgcaaaatcctctaacaagaattgtaaaagtaaatacatcaggatcaggcccatgtttgatcatttcatcttttagccgcatggcaacatccaagtcccccattctgcaaagaccatcgataagcgtattataggtcacaacactgggaacaagacccctgaatcttaactcagcaaataagagaaaagcctcccctatgtttcccaatctggtgtaaccataaatcagagtgttatacgaaaccaaatccggcatcagattctggttcaccataacatccagca

SEQ ID NO: 16650 - DNA, 379 bp, Glycine max
  unsure at all n locations
tctgcatgctagcntttatccaatacaaacgaccataactttttactcggatgtttgattgaggctcgtaatatatcgagacgctcgaaattgaatgttgaagctctgagccaatataaacgacaatgaccttttactcggatgtttgattgagtcccgtaacatatcgagacactcgaaattgaatgttgaacctctgtgcatattcaaacgacaataaatttttactcagatgtctgattgagtcccgtaacttatcgagacgctcgaaattgaacgttgaagctctgagccaatacaaacgaccataactttttactcggatgtctgattgaggctcgtaatatatcgagacgctcgaaattgaatgttgaacctc

SEQ ID NO: 16651 - DNA, 410 bp, Glycine max
  unsure at all n locations
tcaacattcaattgtgagcgtctcgatatattacgggactcaatcagacatcagagaaaaaagttattgtcgtttgaattggctcagagcttcaacattcaatttcgagcatctcgatatgttacgggactcaatcagacatccgagaaaaaagttattgtcgtttgaattagctcagaagttcaacattcaatttcgagcgtctcgatatgttacgggactcaatcatacatccgagtaaaaagttattgtcgtttgaatttgctaagaggttcaacattcaatttcgagcgtctcgatatgttacggggctcaatcagacatccgagtaaaaatttattgtcgtttgaatttgctcanagattcaacattcaatttcgagcgtctcgatatgttacgggactcaatca

SEQ ID NO: 16652 - DNA, 425 bp, Glycine max
  unsure at all n locations
tagggctgaaaggtttgttgaaatacgcaatagggtggccatattgagaaagaactgcacccattccgacgctggaggcgtccgtctccaccgtgaatgggagctgaaaanttggtaaggtgagtaccggaactgaagacagagctgccttaaggtgttcaaaagctgattgtgcttggggtgttcactaaacaggttcttttgtggtgagctttaccaagggagcagcaatggtggcatatccctttatgaaacgccgatagaatccggcaagtcccaggatgccacgcacaacccttgaagattgaggtatgggccattgaaggatggcctctaccttcgaggctaccggttctactcccttcttcgagaccatatggcctaaatattcaacctgcaactgcgcgaataagcattttgataat

SEQ ID NO: 16653 - DNA, 394 bp, Glycine max
  unsure at all n locations
agctttcagcaaattcaaacgacaataacttttttcctcagatgtctgattgagacccgtaatatatcgagacgatcgaaattgaattctgaagctctgagctaattcaaacgacaataatgatttgctcggatgtctgattgagtcccgtaatacatcgagacgctcgaaattgaatgctgaagctctcagctaattcaaacgacaataactttttactcggatgtctgattgagtcccgtaaaatatcgagacgctcaaaattgaatgttgaagctctcagcaaattcaaacgacaataactttnttcctcagatgtctgattgagactcgtaatatatcgagacgatcgaaattgaattctgaagctctgagctaattcaaacgacaataa

SEQ ID NO: 16654 - DNA, 425 bp, Glycine max
tcagaattcaatttcgagcgtctcaatagattacgggactctttcagtcttccgagcaaaacgttattgtcgtttggattagttcaaagcttcagaattcaatttcgatcgtctcgatatattacgggtctcaatcagacatctgaggaaaaaagttattgtcgtttgaatttgctgagagttcaacattcaattttgagcgtctcgatgtattacgggacttaatcagacatccgagttaaaagctattggtgtttgaatttgccgagagcttcaacattcaatttcgagcgtctcgatattataccggactcaatcagacatccgagtaaaaagatattgtcgtttgaatatgctgagagcttcaacattcaatttcgagcgtctcgatgtattacaggactcaatcagacatccgagcaaat

SEQ ID NO: 16655 - DNA, 423 bp, Glycine max
tgaagacaagactatacgaggtatcttccttgggtatagctttatctctattggctaccgtgtctacaacttgcaaactaagaaactcgtcattagtcgagatgttgaagttgatgagtacgcttcttggaattgggatgaagaaaaagtggagaagaacgttcttatacccgctcaactacctcaagaagaagctgaggaagaaaacccaggtgaaccaccttcgcctccaccacaacaacaagatcaagaactatcatcaccagagtctactccaagacgagtaagatctttggtggacatatatgaaacctgcaacttggccatactcaaacctggaagctttgaagaagcgtcaaagcaggaagtatgggttaaggcaatggaagaagagatatagatgatcgagaaaaacaacacatg

SEQ ID NO: 16656 - DNA, 390 bp, Glycine max
agctttattagtcttatccttgggccgaccagcatacatgatgaagggaagggcaaacaagcaaaagtcatacctcatgcatatatttatctccatccatattcaacaaatcatggcacatagcatcataggtccattcatgaatgacaggtgcaatctgtggtgcagattcaatacagtcatcaaaattgagagctataaaaggagacattcatattcatagtgaagagacatttttaacctgatctatggatctgtcaacaatgagcatatcacaagtttcattatgtggaaaaccgggaatggtagatttatatttagaaaccatgtcccaaacagcattagcaagcttggtaggaactaattcacgaaccgctgctgctgtagact

SEQ ID NO: 16657 - DNA, 403 bp, Glycine max
tgtacacatactaaggtttctccttatcttcaaatctatgtgtatgcttcacatacacttcttcatttatgaatccattcagaaaggaactattgacatccatctaatagagcttgatgtctttatgtgttgcataggctaaaagtattatgatggcttcaagtcttgctattggtgcaaaggtttctttatagtcaattccttcctgttgactatacccttgagtaactagtctagccttgttttttactacttctccttcttcattaagcttgttttggaacacccatttggttccaatcgctaaccgattcttaggagggaaacaagattccaaaccttgttcttagtgagttgacgtattttctcttccatagaagtcacccaagaatattcatgcaat

SEQ ID NO: 16658 - DNA, 404 bp, Glycine max
agcttctacattcaatttcgagcgtctcgatatatgacgggactcaatcagacatccgagtaaaaagttattgtcgtttgaatttgctcagagcatcaacattcaatttcgagcgtctcgatatattacgggactcaatcaaacatccgagtaaaaagttattgtcgtttgaatttgcatagagggtcaacattcaatttcgagcgtctcgatatattacgggactcaatcagacatccgagtaaaaagttattgtcgtttgaattggctgagagcttcaacattcaatttcgagcgtctcgatatatgacgggactcaatcagacatccgagtaaaaagttattgtcgtttgaattggctgagagcttcaacattcaatttcgagcgtctcgatatatgacgg

SEQ ID NO: 16659 - DNA, 421 bp, Glycine max
  unsure at all n locations
ttgagccaattcagacgacaatatctttntactcggatgtcttattgagtcccgtcatatatcgagacgctcgaaattgaatgttgatgctctgagcaaattcaaacgacaataactttttacttggatgtctgattgagtcctgtcatatatctagatgctcgaaattgaatgttgatcatctaagtaaattcaaacgacaatatctttttactcggatgtctgattgagtcccgtcatatatcgacacgctcgaaattgaatgttgaatctctgagccaattcaaacgacaataactttttactcggatgtctgattgagtcccgtcacatatctagacgctcgaaattgaatgttgatgctctgagcaaatttaaacgacaatatctttttactcagatgtctgattgagtcccgtaa

SEQ ID NO: 16660 - DNA, 367 bp, Glycine max
agcttcaaactcgaaggtggaggacacatgaacgaaaattcaattcatggggctccgaaaaaggttgagaatggagaattgcacaaagcaatcactacgcatagctccaaactcgaaggtggaggacacatgaacgaaaacgcaattcatgggctccgaaaaagggttgagaatggagaattgcactaagcaatcactacgcatggctccacactcgaaggtggaggacacatgaacgaaaacgcaattcatggggctccgaaaaaggttgagaatggagaattgcactaagaaatcactacgcatagcttcaaactcgaaggtggaggacacatgaacgacaattcattcatggggctccgaaaaa

SEQ ID NO: 16661 - DNA, 403 bp, Glycine max
aattcattttgctatccgacttttaaataataataataataataacctaaagggttatattaacatttacatttatataataaaataatctggtaggctttaaaatattttttgaatgacttaaggggtaacatttttaactaattatacttttataaaatcattaaactaatttatttcctaaaaaaagtgtggtatgacttgactggacgtaatctgtgtataaactattatttacattatcaataaaaaattatcctttatatgattttggtggtaagtaattaaattacttatcatatattatttggaatgagattaaagtataaaaaatggtacatgcatatattatttatttaataattatatatcctattagaattttcattccttttctatatct

SEQ ID NO: 16662 - DNA, 446 bp, Glycine max
  unsure at all n locations
atcttgtcatatgtccccaagacaaactagtatcacggaagaagaaaaagatgggagaagaatgatgcaaagcagtcagagatgaagtatacaagctcctcaaagtcaacttcatcagagaattcagcttttccaccaggctcaccaatgtcgtcatggtcaaaaaggccaatggcaaatggggaatgtgcaccgactacaccgatctgaacagggtgtgtcccaaggatgcataccctctgcccaacatcaacaagctagtcaatggagtgtttccaagttctaagcttcctagacgcctactatggatacaactagatccggatgcatgctcaagacgaggagaaaatgacattcatcattgaagatgccaactnttgctacaaggccatgccttttgccttaaaatggaggcgctacatactagagatgggtggtcagatctt

SEQ ID NO: 16663 - DNA, 346 bp, Glycine max
aatcaaccacagcagaacaattatgacctctccagcaacagatacaaccctggatggaggaatcaccctaacctcagatggtccaaccctcaacaacaacaacagcagcctgcttcttccttccaaaatgttgttggcccaagcagaccatacattcctccaccaatccaacaacaacaacaaccccagaaacaaccaacagttgaggcccctccacaaccttccctcgaagaacttgtgaggcaaatgactatgcagaacatgcagtttcagcaagagaccagagcctccattcagagcttaaccaatcagatgggacaaatggctacccaattgaatcaacaaa

SEQ ID NO: 16664 - DNA, 446 bp, Glycine max
  unsure at all n locations
agcttatgctgtaagaagtaagatgtgtgcttgagatgtgtttaaaccttatctcaacaggaaagcttgatgaagttgggatgatataccagttcggtgctggtagatggaagcttagtagaggaagcatggtcattgctcaaggtaagaaggaaggctccttgtacatcatgccagganagatatgcaaatggaagatgaatgttgctcaagatacaaccaaagaattatgacacaagagattgngtcacatgagtgagaaaggtttggagtttctaacanaggatcactgtccaaacataaagggccagccacttgaatcttgcgaagactgtcttgcangtaaaaagtgcaaagtgtctttccaaagatcggatgaggctagaaggagaaaaaaatcctagatcttgtccattcaaatggttgctcaatgtctgaaaagtctc

SEQ ID NO: 16665 - DNA, 431 bp, Glycine max
  unsure at all n locations
atcttttataatatgaaattgtctgtaagtcatttgagaattnttggttgtacaacatatgcattagttgatttatggactaagttggatgataaatctatcaaatgtgtatttattggctatgctactcagtcaaaggcatacagactgtataacccactaactggcaagataattgtcagtacaaatgttgtatttgatgaagatgcaggctgggtttgggaggaatgtgaaatcagtcaaagtgttcagcagaaatcagtcaattttgatggtttagaggaggtctcanatgtgccacataatgatcacactccaagccctccttcaatgccatcaagccagggatcattaactccttcaagccaggtatcatctagctcatcaagtgantttgctccaaggagatacaaatctttggcagacttgta

SEQ ID NO: 16666 - DNA, 421 bp, Glycine max
  unsure at all n locations
tgcttattttgatgatgccaaagactcaagtcaagaatcaagattgaagcaaatttcaagaatcaaagggtcattcaatcaagaatcaagattcaagagaagactcaagatatgtaagaacctcaagaaaaacatcaagataagtataaaaagaatttttcaaagaaaagattgaatgacacaatttgtccaaaataatttttcaaagaaaaatcttttaccagagtttttactctctggtaatcgattaccatacagtaatcgattaccagaagtccaaaacaattntataactgttntacaaagtagtaatcgattaccatgggcatgtaaccgattaccaatgttnttgaacgttgaatttcanatctcaagagtcataacttgtgacanaatattttcaaaatagtgtaatcgacta

SEQ ID NO: 16667 - DNA, 359 bp, Glycine max
  unsure at all n locations
agcttgttgtattggnttcttcctcttcttctctggcagtgcaaatggattggattatggaactgttggagagcaatttggaagccaagtccaaaatttacaaggaccctgctttgagttatattttcttgatgaacaatgggaggtacattgttcagaagacaaagatagtgaattgggaaccctctttggagaagaatggatcagaanacacgctgcaaagttaggcaattccatgtgcactatcanagaagctcgtggaataagctattannggattctgaagtggatagtaatgggtcaatgccccatattaactttgcaaagtcaatgaaagagaaaactcagtcgttaacaca

SEQ ID NO: 16668 - DNA, 299 bp, Glycine max
  unsure at all n locations
ttctttttctgttggctgannattatcatgcagacttttctgatgatgaccgatgaacaattatggatcaacttgaaacttatgtgcttcgagtgagaagaaatgcttctttttccacttgtgaagatgttcaaagtgtggctatgaagatggttcaaactgagaaacatttggtatttccattggtttataaacttattgagctagctttgatattgccggtgtcgacagcatccgttgaaagagccttttcagcaatgaagatgatcaagtctagattgcgcaataagatcaacgat

SEQ ID NO: 16669 - DNA, 388 bp, Glycine max
  unsure at all n locations
gtgcctcttcatgtctggaatatgaatgtagcatatagattcaaagactcttagatgctttgctgatggcttcttcccgttccaagcttcaattggaatcttgtctcttacagacttaattggacatatgttgagtatgtaaacagcagtgtagacttgttcaatccaaaatgtgttaaggagtcccttctccttgaacatcgatctaactatttccataactgtgcgattctttctctcggacactccattntggtgaggagaatatgcgactataagttgtcgctctatgccttcatcctcacaaaatatttcaaactcgcgagaggtgtactctttgccgcgatcacttcttagtacttttatctaatttccactttgattttca

SEQ ID NO: 16670 - DNA, 292 bp, Glycine max
tttcttttagaagaagatacacacatgttttgccatgccaaaatcagcaaccttgatcataccattacgatctactagcatgcttgagccctttatatccctgtaggattggacacattagtgtcagatacttggaactagaaataataatgtatattatcatttgttacatattaacacctgtgcacgcgatctcttgcatgcatgtaggctatagcatgaagaatctgtctggtgttacatttcgcaagagatgtcttgaaagggccatatacctgatgcaaattgcgaa

SEQ ID NO: 16671 - DNA, 383 bp, Glycine max
agcttgatatctacatttgtgtgaaaagttatgagcatttgaatttctcaagagcttccattgttcaatttccagcatctcgatatattataagcctgaatcggacattcgtgtgaaaagttatgaccatttgaatatctgaagaggttccgttgttcaatttcgagcctctcgacatattatacgctcgaatcgaacatccgtgtgaaaagttatgaccatctgaatctgcaagagtttccgatggttaatttcgagcgtatcgatatattataagcctgaaacggacattcgtataaaaagttatgaccatttgaatttctcaagagcttccggtgatcaatttcgagcctctctacatattatgcgcccgaatctgacat

SEQ ID NO: 16672 - DNA, 429 bp, Glycine max
  unsure at all n locations
tatgagagatcccagtttggtggagagataagtccttgntttgctgatttaaagcatttgaattacttggacttgagcgccaatgaataccttggagaaggtatgtcaattccttctttccttgggacaatgacttccttgactcaccttaacctttttcatactggattctgggggaagaatcctcctcaaaatgggaatctctcaaatttggtgtatcttgacctgagttcaaatgttgccaacggaacaataccctctcagatcgggaatctctctaagcttcgatatcttgacttgagcgccaatatatttcttggagaaggcatgtcaattccttcttttctcgggacaatgacttccttgactcacctcgacctctctggtactggattcatggggaagattccatctcagatttggaatctc

SEQ ID NO: 16673 - DNA, 312 bp, Glycine max
  unsure at all n locations
tcttcttctgtcacttttttaaatgaaggaccagaaaacatgccaccccattgtggaaaagagattaaacatattggcagggtgcatattatgatcatggctcccattagagtgattcctctttcttttgaaaacttggatcctttgaagaaaattaactgggtcacaactgcacccacattgcctcctcctcctgtcattccagatatgacccctaatgacctgaanatatatgtgtatgctaatgcatnatngtagaattaatcacaaaagaattattggcatagaagctatgcactntgttatatatct

SEQ ID NO: 16674 - DNA, 310 bp, Glycine max
ccaaagtcctattaacaacttccgtttgcccatcggtttgtgggtgacaagtggttgaaaataacaatttaatgcccaacttgctccacaaagtcctccaaaaatggcttaggaacttaaagtccctatcactaacaatgctccttggcaaaccatggagtctcacaatctccttgaaaaacaaatcagccacatgggaagcatcatcaacttttttacatggaataaaatgagccattttagaaaacctatcaacaaccacaaaaatggaatctctaccattgcttgtttttggcagcccaaaacaaaa

SEQ ID NO: 16675 - DNA, 426 bp, Glycine max
tatgctgcaaatatttacaatagacctcctcaacctcatcttttaaatttatcacagcagagcaattatgacctctccagcaacagatacaatcctggatggaggaatcaccctaacctcagatggtccagccctcagcaacaacaacagcagcctgctccttccttccaaaatgctgctggcccaagcagaccatacattcctccaccaatccagcaacagcaacaaccccagaaacagccaacagttgaggcccctccacaaccttccctcgaagaacttgtgaggcaaatgactatgcagaacatgcagtttcagcaagagaccagagcctccattcagagcttaaccaatcagatgggacaattggctacccaattgaatcaacaacagtcccagaattctgacaagctgccttctcaagct

SEQ ID NO: 16676 - DNA, 437 bp, Glycine max
tccttaagaagattcctaaagaagctagagcttagctacacatacctctctaatagctaagctcacctccttgagatgagaagctagaacttaactacacaccctttataatagctaagctcacccccatgacaaaagaaaacatgaaaatacaaaaaaaagtccttactacaaagactactcaaaatgccccgaaatacaaggctaaaaccctatactactagaatggccaaaatacaaggcccaaacgaaggaaaaacctattctaatatttacaaagataagcgggctcatacttagcccatgggctcgaaatctaccctaaggctcatgagaaccctagggcctacccttggatctttagcccaatctacttggagtcttctacccaatgcccttgcgggataggatggcatcacaaagcatcaaaattcaat

SEQ ID NO: 16677 - DNA, 439 bp, Glycine max
  unsure at all n locations
tcatggaattntatgcgatgacatgggacttggaaagacacttcaagcatcagctattgtggcctctgatatagctgagcatcgaacttcaattgggaatgaggatcttctgccatctttaattatttgcccatcaactctagttgggcactgggcctttgagatagaaaagtatattgatgtttctgttatctctagtcttcaatatgttggttctgctcaagagcgaatgcttcttcgggatcatttttgcaagcataatgtcatcataacgtcatatgacgttgtccgtaaagatattgattttctatgacagctgttgtggaatcactgcatcttagatgaagggcatataatcaagaatgccaagtctaaagttacacttgcttgtaaacagttgaaagcccaacaccgcttgatattgagtggtacacctata

SEQ ID NO: 16678 - DNA, 213 bp, Glycine max
gtggatgaatcatcccaaccttacatgggcgatatcttcacaactagtagcaacaacaaccttattttcaaaatgttgctggcccaagtataccatacgtttcctcaccaatgtagctgcaacaacagcaacagccctaaaaacagtaaacagtcgaggcttctccgcaaccttcccttgagaactttgaggcaaatgatatgcaaaacatgc

SEQ ID NO: 16679 - DNA, 436 bp, Glycine max
  unsure at all n locations
gcttgatgcaacattnggagagattaatgaaacaacgatatgattcgctccatgatttgttggatcaaatggagaatagagatcataatgaagaagaaaggaggaggagagggaatgatggtgttcctagacaaaaccgaattgatggtattaaactcaacattcctccctttaaaggaaagaatgatccagaggcctacttggagtgggagatgaaaataaaccatgttttctcatgcaacaactatgaggaggaccaaaaggtgaagctcgccgccacggagttttccgactatgctcttgtgtggtggaacaagttacataatgagagagcaagaaatgaagagccaatggttgatacatgtgcagagatgataaggatcatgatgaagcggtatgtgccggctagttacttaagggatttgaaattcaagct

SEQ ID NO: 16680 - DNA, 312 bp, Glycine max
ggacacttttagcacttccttacatgaatacaataatcattcttcatcacgagcaaaaaatatccagcccttaaaatctttcaggccatggcatgcccattggcataggggccaaaggaaccttcatgcaccttccttagtatttgctcaacttcacttacatccacgcaccggagtaacaccatatcatggtttcttttgtatagcacgtccccattcaaaaaaaagttaactgccaacctccgtagtgtcctcttgtcattctcaaaggcctcatataggtactccctatctttgatatatctcttgata

SEQ ID NO: 16681 - DNA, 431 bp, Glycine max
  unsure at all n locations
tcatgtcttnttgaacttccttatcttctaacctgcaaatatatgcaagtcagtaacaattgatcccaccaaatcaaatggtcaaaaatcaacaacttgagcaagtcttactttcttccgataagtctcttgacatcaaagatggtcctttctgggttgacagctgcctgattcttggcagccttcccaatgagtctctcactgtcggtgaaagcaacccacgatggggtgatacggttaccttggtcgttggctatgatttcaacatggccattcttgtaaacaccgacacatgaataggttgttccaagatcaatgccgatgaccgtccctaacttggtggcttccttcttagcaatggaaatcgcaaatagacatcctatggagaaatttctcaatgttagttacatagttaaatttttacaacactt

SEQ ID NO: 16682 - DNA, 410 bp, Glycine max
gacacttcgaaactcaagcttctatagaagtccattcctaattgtctacaatagcattttctctcaatgatctggagacaaagaacgtggcattgacctgtggtgaaaaacaataagcagcctttgctttgctcaaagaaaagcttactaaggcacctattctagcttttgctgacttttctaaaacctttgagctagaatgtgatgcctctggagtgggagttggagctgtattggtacaaggtggacaccctattgcttatgttagagaaaaactttatagtgccaccctacactaccccacctatgataaagagctttatgccttaataagagctctacaaacttgggaacatttaccttgttccaaggaatttgtcattcataatgatcatcaatcacttagtaca

SEQ ID NO: 16683 - DNA, 357 bp, Glycine max
  unsure at all n locations
ggatcttttaggtttttatctttaatcttttatccctgaacgaactattcaaagttgtaattcgaactttaattatcttttaattcgctcctaaagatagatcgccaaatctgttgctaactgcacattaatctgttaaagatataacagatttatgtgtccagtattttcgggcaagatgttctggacatcgtatccgacatcgtggatcctgcagcttcaattcttcattngacattttatcttgccttgtgcattgtgcagcccaatctgattccttgacataaccgtggacatcatgtgcagcaactccagcttttcttcattggctaagtgcctatgttttaacaaaattta

SEQ ID NO: 16684 - DNA, 434 bp, Glycine max
  unsure at all n locations
ttatcactggcattgcacttcctgttggttccgacaaactttattctggcatcactgatgggacagttaggatatgggactgccatactggtcaatgtgctaaagtcatcaatcttggtgctgaaggtacctctttgatcagtgaggggtcatggatttttgttggtctgcaaaatgctgtcaaggtaagctcttatctggcattggtttggtttgatgtatgataatgtctaatcataagagtagtacatgcaaactgattatgtggctgtggttggtgtgaaagcttggaatatccagaccatgtcagaagttactctcgatggacccaaaggccgaatccctgccatgacttgtggcaacaatacactctnttctggcgcagaggtaactaaccatgttattaatattgcgcaatgatattcccctaaccg

SEQ ID NO: 16685 - DNA, 421 bp, Glycine max
agcttgttggttacagtgacaacaattgggctggagatgaagatgattggaaaagtaccagtggatttgtgtttttcataggaaacacaaccttcacttggatgtcaaaaaagtagccgatattcactcttttgactcgtgaggcagaatacgtagcagctacttcatgtgtttgtcatgcaatctagcataagaatttattaaaagagttgggcatgtcacaagaagagttgaccaagatctttgtggataataagttagtcattgctctagcaaggaatccagtgttctatgatcgaagcaagcatattgataccccttaccactacataagggagtgcatagcaagaaaggatgtacatgcagaatatgtgaagtctcaagaccaagaagctgacatcttcaccaagctgctcaagca

SEQ ID NO: 16686 - DNA, 446 bp, Glycine max
  unsure at all n locations
ttgacagaaatccgacatcgtaacattgtaaagttacatggtttttgttcacattttcaatactcatttttggtgtgtgagtttctggagatgggcgacgtcaagaagattttgaaggatgatgaacaagcaattgcgtttgattggaataaaagggtggatgttgttaaaggtgtaacaaatgctttatgctatatgcatcatgattgctcacctccaatcgttcatcgtgatatatcaagcaagaatgttcttttggattccgattatgtagctcatgtctcagacttcggaacagccaagtttcttaatccagattcatccaattggacctcctttgcaggaacctttggatatgctgctccaggttaatttcctttctctatactatttgagtaaatcatgatattntagtttgtcttcgttagccatttacaaatatatat

SEQ ID NO: 16687 - DNA, 443 bp, Glycine max
  unsure at all n locations
tctaagaatagccttgataactntaacataatccattgattcttccccaaaaaatatagtgtcatcagcaaattgaaggatattcactgcaaccttgttcttccccaccataaagttgtggaagcagtgtttggatattgcttccttcatcattcctgtcaaacgttcaacaaccaagtcaaacaataaaggggccaaaggatccccttgtctcaaacctctttgaggcttaaattcagtagttgggctttcattaactacgatagatatagaggctgatgtgaggcaccccttgacccaactaatccacctgtcatgaaaccccattcttctcatcatataaaaaaggaatttccaagacacatagtcatangctntttcgaaatccactttaaacaccaagcaagacctctttgacctcctaagcccctcaacaacctcat

SEQ ID NO: 16688 - DNA, 355 bp, Glycine max
  unsure at all n locations
tgcatcaataaagaggtcttattggttcaaatntatgttgatgatataatctttggatctactaatgaatctttgtgcaaggagttttctattgacatgccaaatgagtttgagatgtccatgatgggtgagttaaactactttcttatattacaaatcaaaccaacaaatgatgggatctttgtcaacccagcaaaatattacaaggaactcatcatgaaattcggaatgaagaactcaaaacacttggctactcctatgagcactggttgctacctttgacaagatgaatccggtcaattcgttgatgaaaagcaatatagaggtatgattggatctctactttacttatatg

SEQ ID NO: 16689 - DNA, 344 bp, Glycine max
  unsure at all n locations
tgagaatggagaattgtactaagcaatcacttcgcatagctccaaactcgaaggtggaggacacatgaacgaaaacacaattcatggggcttcgaaaaaggggttgagaatggagaattacactaagcaatcactacgcatagctccaaactcgaaggtggaggacacatgaacgataacgcaattcatggggctccgaaaagattgagaatggaaaattgcactacgcaatcactacgcatagcttcaaacgcgaatgtggaagacacatgaatgaaaacccaattcatggggctcccaanagattgagaatggagaattgcactaagcaatcactacgcata

SEQ ID NO: 16690 - DNA, 437 bp, Glycine max
agcttttactatcctattcaaatgttaacatgactgttaccctaaaataaaatcaccaaacaaaagattgccaaaagtatctcccaccaaccccgaagatcaaatctcatactccctccgtttcaaaatacatgtccatttttgaaaaattgcggtaaccaaggacaggctaatttgacacaaaagttcctattttacccttgtcctttattttctccattttatatttatttatcccacctcataattactcccaataccaaaattaattaaagttaatcaaattacaataccaatacatactggcaataccaatactactaaatggcattatgtttgcttcggtattgaaaagctcaatgggcatagttcggttatcaaaagtttttaaaactcaattgaaaaaacttccctccattattacatatactctaatc

SEQ ID NO: 16691 - DNA, 384 bp, Glycine max
  unsure at all n locations
ntaaacctctcacaaaagggaagacttttatagaagatgtatctccaatttcttagaggtgagttcaaatccttacatataaaagagtcagaatccattttccattattttttaagatttcttgttggttcacatcaaataaaaagaaatggtgagaagttagaagatgttagaattatggagaaagatactacgcccgttagatcccaaatttgagcatattattgtgacaatcaaggaaaccctagatttaaaaaccatgatgatagaacaacttcaaggatcattgcaagcttatgaagagaagcataagaagaagcaacagatcactaagccactcttcaagatgcaactgatggagaaggaagaaagtcaacgaaatga

SEQ ID NO: 16692 - DNA, 404 bp, Glycine max
  unsure at all n locations
agctattgnntttaattnctagagncnnganatatnacgggacttattcgaacattcgagttaaaagttattggcgnctgcatttgctcagagctttcgttttcaatgacgagtgtctcgatatgttacgggagtgatccgagttaaaagttattgtcgtttgaattttctacgagcttttgttttcaattttaagtgtcttgatatattacgggactcaatcggacatccgagttaaaatttattgtcgtttgcatttgctcagagcttatatactcaatttcaagcgtctcgatatattaagggattcaatcgaaaatccaagttcatagttattgtcgtttgaatatgctacgagctttcgttttanattatgagcgtctcgatatattacgggactcaat

SEQ ID NO: 16693 - DNA, 470 bp, Glycine max
  unsure at all n locations
ctattcggacctatgatactcagcttgtaggtagttctcttgattgacctatttgatatttcatttacttgntatttcacattttggtaggtttaaatattaataatgggacagtgtgtccgtcaaatttaagaatgaaattggttattcaatatagaaaaaaaaagcatgggataatgaaggtaatgggacatgaaatttttcataactcatttcattttatccattttcatacaagattaaatttgaactattaaattaagttagcaatataaacttatcttattaagtcataaaatatatatatcaaaataagaaaaaagataagactttacttacttttcagttaaattaaaatttgaattaataagaatttttttcttctaatgaattgaaggattaaaataaataaaaataataattatctatattggtatcttgaacacgcgtacccttatataatgtgtcta

SEQ ID NO: 16694 - DNA, 425 bp, Glycine max
  unsure at all n locations
ntggagtaaaaggcttactaaagaaggcaatagggtggcctttctgcgataagactgcacccatgtcgacaccaaacacgtttgtttccaaggaaaaagggataatgaagtccggcaagagtaaagtaggggctatagaaagcacatccttcaatccagtgaaaacttgttgcgccttagatgaccactcaaaggggtacttcataagtaacctggttaaataagctgcaatggaggcatagccacgaataaatcggtgatagaaacccgagaggcccaaaaaactgtgcaaggccttggaggaatgaggtgtgggtcactgctaaatggctnggaccttagccgacactggttcaactccttgtgcaaaaaccaggtgacccaagaactcaacttgttgctgggcaaaggtgcacttggatagt

SEQ ID NO: 16695 - DNA, 368 bp, Glycine max
tgtaatcgattacacacatactgtaatcgattaccagatgtatttttcagaaaacattctcaacagtcacatctttttatctgattcttaagtggccatcaaaggcttatatatatgtgactagagacacgaattgaacaagagttttgaagaacaaaaaggtcttatcctcttaacaagcaaaattggtttatcctcttacaaattccttggccaaaacactcgtgattcaataaggaattatttgagtgctcaaattgttcaatctatctctttctagagagatttcttcttctcttcttctttattctgaaaagggattaagagaccgagggtctcttgttgtgaaaggattctaaacacaaatg

SEQ ID NO: 16696 - DNA, 377 bp, Glycine max
  unsure at all n locations
tagcttcttcaaagacttgnggtccaacataggcatcatttcaagcctaatcaacgaggtaacacccccttgggtggtcctaacaattggtggggttctcaatttttttgggtatttcataatttggcttgcagtggccagaaaaattgctaagccccaagtttggaacatgtgcttgtacatcttcattggagccaattctcactgttccaccaacactggagtcattgtcaccagtgtaaagaacttccctggcacaaggagcattgtaattggcctcttgagtgggtatcttggcttgagtgcagctatcatcactcagatatactatgccttctatggaaatgattccaagnttctaattntgctcatggcat

SEQ ID NO: 16697 - DNA, 349 bp, Glycine max
acctacgatctttaatggagagggttaccactactggaatacccgaatgcaaatctttatcgaggcaatagatctaaatatctgggaagccattgaaatacggccttatatacccaccacagtataaagagtttcaatagatggtagttcatcaagtgaaagcataaccatagataaacctagagatagatggtctgaacaggatagaatacgagtacaatacaacctaaaagcctaaaacataataacatctgccctaagaatggatgaatatttcagagtttcagattgtaagagtgctaaagaaatgtgggacactcttcgattaacacatcataggaactacaga

SEQ ID NO: 16698 - DNA, 403 bp, Glycine max
  unsure at all n locations
agcttgtctctgtggaagaactatggtgatggtgttcaaaggcaaggtaggacaggacgcaattttcctgctgcaaggtcaccaacgccagtgacatctgagaagcttggaaatatagggactgtaaagcagcttaaaagttcaagactgggacttgagaagagtgaaaggttaaaatacttgtattgcttaagtttgacnatttgtttaggctcacatatgnnagctaatgttggtgattccatgtagcagggcaggtcgtccaccaaccaggaaactttctgatcgtaaagcatatgcacgccagaaacattcagcaattagtgcatcagcagattttcttggtactaatttctgcttctagaaaagagtaatgatctcaagttctcatgtgtataataca

SEQ ID NO: 16699 - DNA, 479 bp, Glycine max
  unsure at all n locations
tanagataaattaagaataataatagaatattccatcttatattctgattatatattctatcaaatacaaattgattagttagactaagaataccgatagactatcttatcattgataatatattctatcaaatacaaactgattagttaggctaacaacactgatagaatatcttatcatatattctatcagttattacttattagattgtacatattaattcttttatttaaaaatatcattgtcaaagtaggataaatatttaattatatacaattngttttattaattattaataaccttctactttatcctaataatttatacttaacagatgagtatttntctcattataactatgtactatccaatgtcttattagatttttaataacatattatccatttaatttacagatgactgtaatttgatcaatcattagtatatatatttatactatcgaccgattaagttaaag

SEQ ID NO: 16700 - DNA, 443 bp, Glycine max
  unsure at all n locations
ntaaggaagcaatgcattaccccacatggatcaatgcaatgcgattatctgctgaattctattgagaagaattcaacatgggaacttgttaatctgcctcttgacaagaaacccatagcactgaagtgggtttataaagtgaaggtgaaatccaaatgaggccagacttgtggcaaaagggttcttatgaaaacctggagttgactatggtgaggtctatgcacctgtggcaagaatagaaacagtgagattggtggtagcaattgcaaatatataaggttggtctatgcataaactacatgtgaagtctgctttcttaaatggacagctagatgaggaagtttatgtggaccagccacttcttgagacattgggacaagatgaaaaggtatacagattgaaaaaggaatatatggtcttaataagctccatggcttggaaca

SEQ ID NO: 16701 - DNA, 465 bp, Glycine max
  unsure at all n locations
tctgtgagagcacttccttgagaagctagagcttagctacacacacccttttcatatctaagctcacctccttgagaagcttccttaagaagattcctaaagaagctagagcttagttacacaaacctctctaatagctaagctcacctccttgagatgagaagctagagcttagctacacacccgctataatagctaagctcacccccatgacaaaatacatgaaaatacaaaaaatatccctactacaatgctactcataatgcctcgaaatacaaggctaaaaccctatactactagaatggcctaaatacaaggccccaatgaagganaaacctattctaatatttacaaagataagcaggctcatacttagcccatgggctcgaaatctaccctaaggctcatgagaaccctacgggccttccttggatctctggcccaatctacttggactcttctatc

SEQ ID NO: 16702 - DNA, 368 bp, Glycine max
  unsure at all n locations
atgtactgccttangcgatgggatgcccatactaaagcacaacacgttctttcgagcaaggagtaattcatctcacaggtcgtgaacttcttacttaggtagtaaacagcgcgctctttcttcccggattcgtcatgttgccccagcatacaccccattgactcgtccaagattgtcatgtacaaaatgagaggccttccaggtactgggggcataagcacgggaggattcattangcactctttgatccttccaaaaagcctcttgcaatcctcattccaccagtcagtttggtttttacgcaagaagttatacaacggctcacaaatggcggtgagctgcgatatgaatctggccatataattcaa

SEQ ID NO: 16703 - DNA, 373 bp, Glycine max
agcttttgcctcttcatgtctggaatatgaatgttgcatatagatccaaagaaccttaggtgctttgctgatggcttattcccgttccaagcttcaataggtgtcttgtcttttacagacttagttggacatctgttgagtatgtaaacagcacagtagactgcttcagcccacaatgtgttatgtactctcttctccttgagcatcgatctaaccatatccataattgcgcaattctttctctctgacacttcattctcgtgaagagaatatttgactataaggttggcgctcaatgccttcatcctcacaaaatctttcatactcgcgagaggtgtactctttgccgggatcacttcattaaacttttatc

SEQ ID NO: 16704 - DNA, 477 bp, Glycine max
  unsure at all n locations
tcaagaaaaagatggcctcagcaaattccttatttccagatagtttctctatcaatagacctccaatctttaatggagagggttaccactactggaaaacccgaatgcaaatttttatcgaggcaatagatctaaatatctgggaagccatagaaatagggccttatatacccaccacagtagaaagagtttcaatagatggtagttcatcaagtgaaagcataaccatagaaaaacctatagatagatggtctgaagaggatagaaaacgagtacaatacaacctaaaagccaaaaacataataacatctgccctaggaatggatgaatatttcagggtttcaaattgtaagagtgctaaggaaatgtgggacactcttcgattaacacatgaaggaactacagatgttaaaagatctangataaatgcactaactcatgagtatgatatatntagaatgaatgcaaatgaaaata

SEQ ID NO: 16705 - DNA, 485 bp, Glycine max
  unsure at all n locations
tgatattntattgtttcaatcaaagtcataaagttcatgatgaattgtatcaaatagagaaagaagtaaaagctggcaaagaaagcaacaattgatcaaatggattgaatgaatctcattgaaagaaatgaatgatgaatacatgtgtttcatattatatacaatcaactttgggcaccaatctaactactagaaaatacaactaactataactgcttctaactgtcaaaacagaaaacagttagtgcataactaattctatatgttgagagccctcccaatatgaggaatgtatgttagacatttccaacttgagctgcaaaagacaaaaagcaataggagagaaagctttggtgaatatgtcggcaagttgataggctaaagatatagatagaagattgatcaagcctgaaagcaatctcttgcacacaatgttggaagttaattttgatgtgctttgtgcgctcatgaaacacagggttgac

SEQ ID NO: 16706 - DNA, 380 bp, Glycine max
agctagagtttttctttatatatgacatgcatgatgccctttcccactgtatccacttaaatttccatatgctagaaaatcattaatagtacaaaacaccattgtgcgtaacctgaatgtctactgcacatttgcatcccacacatctaccccttcttcccacaattgtttcaagtcttcgattaatggcgtaagatacacatcaatatcattccctggctgccttggacccgcgatcatcatacacaggataatgtatttacgcaaaatgcacaaccatgggggaaggttgtaaatcatcagtaaaacaggccaggaactgtggttgctgcttaagctaccataaggattcattccatcagaagcaagagcaagcctta

SEQ ID NO: 16707 - DNA, 381 bp, Glycine max
  unsure at all n locations
agctngccgttatggtgtgtttcgactatgctctcgggtggcggaacaagctacaaaaggagagagcaagaaatgaatagccaatggttgatacatgggcggagatgaaaaggatcatgaggaagcggcatgtgccggctagctactcaagggatttgaaattcaagctctaataactaacccaaggcaacatgggggttgaggagtatttcaaggaaatggatgtgctcatgattcaagcgaagattgaagaagatgaggaggtaactatggctcgatttcttaatgggtcgactaatgatattcgtgatatcgttgagctgcatgagtgcgttgagatggatgatctgcttcacaaaccactccatgtagagcaacaat

SEQ ID NO: 16708 - DNA, 393 bp, Glycine max
  unsure at all n locations
ggtgcatccaataccctgatgaggatgtcccatatgttcttaaatctgtactgattcatttgcttccaaagtttcatggccttgcaggtgaagacccgcacaaacatttgaaagaatttcacattgtctgctccaccatgaaacccccagatgtccaagaggatcacatatttttgaaggcttttcctcattcattatagggagtggcaaaggactggctgtattaccttgctccaaggtccatcacgagctgngatgaccttaagatagtattcttagaaaaaaatttccctgcttccaggaccacaaccatcaagaaggatatctcatgtattagacaactcagtggagagagcctgtatgagtactgggagagatataagaaactatgtg

SEQ ID NO: 16709 - DNA, 365 bp, Glycine max
agctttatctttcaatttcgagcgtctcgttatattacgggactcaatcagacatccaagtaaaaagttatcatcgtttgaattggctcagagcttcaacattcaatttcgaacgactcgatatatgatgggactcaatcagacatccgagtaaaaagttattgtcctttgaaatggctcagagattccacattcaatttcgagcgtctcaatatattaccggactcaatcagacatccgaaaaaaaaattattttcgtttgcatttgctcaaaggttcaacattcaatttcgagcgtcttgatatattacgggactctatcagacttccgagtcaaaagttattgtcgtttggatatgcttcaa

SEQ ID NO: 16710 - DNA, 454 bp, Glycine max
  unsure at all n locations
ctgagacaattcatacgacaataactgtntactcggatctctaatttagttccgtaacatatcgagatgctcgaaattgaatgtggaatctctgagccaattcaaacgacaataagttnttactcggatgtctgattgagtcccgtaacatatcgagacgctcgaaagtgaatgttgaagctctcagccaattcaaacgacaataactttttactcggatatctgattgattaccgttatataacgagacgctcgaaattgaatgttcaacctctgagcaaattcaaacgacaataacttctttctcggatgtttgattgagtcctgtaatatatcgagacgctcgaaattaatgtttaagctctatccaattcaacgacataacttttactctatgtctgttgagtccataatatacgagacctcgacatgaatctgaactctattcattcaa

SEQ ID NO: 16711 - DNA, 373 bp, Glycine max
agcttgtattttcttttattatggaattgatccttcctaagatggagccaaacccactcaccctcattaagaactagctcttttcttcctctatcgcccttaggtgaatacacctttgtttggttctctatttggctcttaaccctttcatgctacttttatacaaactctgacataaattccccttctttatggataaaagaagtgtccactgggaggggaatgaggtcaaactgtgttaggggattgaacccatagacaacctccaaaggggactggttgggggttctttgaacccccctgctgtatgcaaattctacatgaggaatatactcatcccaagacttatggtttcctttcacaaaaaccctta

SEQ ID NO: 16712 - DNA, 458 bp, Glycine max
tcttcttttgctgttgctatctgattgtccatgtcagccagtttttcagttggttcaatgtttcctgaatcaatcaaggccataatcttctcccgggcagcatctggatctacttctatatgagcacagacaaatatctcttcgagctctgcttgcttcttgaaagcaatttccttcatcctgctggctttcagctgatcaagtctctcaacttccacttcagcctttattattaaaggaaaaaaacagttaatatcatacttggaactcgaatctgtaaacttcataagttctttagtacctacctgctcaatcagatccagagcaagggcaccaggaacagtgacttcatcaacagaagctgacatattacaggtaacatggtcaaatagtctcctttcctcgggatgagtatccattagattccaaagatcaattaactgagaagctaattcttg

SEQ ID NO: 16713 - DNA, 464 bp, Glycine max
  unsure at all n locations
tctttaaagcanaagataaatagcaataaataaaagaagtctaagggaagagaggtatgcaaacttgatttatactggttcggccacttctcgtgcctacatccagtcctcaagcaacccacttgagattttccattctctttgtaaaactctttttacaaagtctgaaccacacagggacaaccctttccttgtgttcaggaatcctctataacaagagacccacggtctcttaatcccttttcagaaaaaagaagaagagaagaagaaatctctcttaaaagagatagattgtacaatgaagatcaatcaaaattccttattgcatatgcaagtggttgaccaaggaatctttntgagaagataagacagttcagttcagaaaaactcttaatctttgaaaggataaaactttttgggcaatgaaaactccctttgaatttgtgtttccaagtcacctttga

SEQ ID NO: 16714 - DNA, 321 bp, Glycine max
gttgcctaaaagttactatcaagcgaagaagatactatgtccaatgggtatggagtatcaaaaaattcatgcttgcccgaatgattgcatattgaacagacatgaattagaagatatgtcaaaatgccttacgtgtgggatatcacgcgtcaaagtcaaggatgatgaggagtgtattagtgatgaatactcaacgaagggcccccctagcaaaggtgatgtggtatctgtcgaacgttccaaggtttaagcgtctttatgctaaaggatacgacgctaaagatcttacatggcatgcatatgacagaaactgcgatggaa

SEQ ID NO: 16715 - DNA, 237 bp, Glycine max
  unsure at all n locations
cgctgatactgtcatccagggattactaaaatatgggcctatnataaattgntccaaggaggttatgtttctacgagagctggaggaaatcttanaagtaactcaacctgcagagttgcaacgttgtatggtaccattgttccaccaaataagtcgttgtttgagcagttcacatttacaggtttgataactattactagtcttcagtagttactactgtctctcgtgatcatatat

SEQ ID NO: 16716 - DNA, 488 bp, Glycine max
  unsure at all n locations
ctttanattatatatataatatactttgtgttaaaagtatttagttattctaacttgacattatagtttaatatataaagtattttatatagcgtgtactgtaacgatactttaacacctaaatatatgcatgatagtattcaccatttaacacaacaaataattgatataagattaatttgatgaaaaaaaaaagaaaaagagattatacattcacatttttgtgctaacaaaaagaagctaacaaagacaataaattaataactgatattttttaattaaaaaaacactcaacaaacaaattaatagctaatatttttaattaaaaaaacactcaacaaatagtaactgatatttttcaattaaaaaaacactcaacatatagtaactgatatttttcaattaaaaaaacacttcacaaatagtgctagtagtgcatgctagatgatagaaggaaaaagtggaaaaaatgaaaaataattagcaca

SEQ ID NO: 16717 - DNA, 396 bp, Glycine max
  unsure at all n locations
agcttgtgcattcaataccctgatgaggatgtcccatatgttcttaagactggactgattcatttgcttccaaagtttcatggccttgcaggtgaagacccgcacaaacatttgaaagaatttcacattgtctgctccaccatgaaacccctagatgtccaagaggatcacatatttctgaaggcttttcctcattcattagagggagtggcaaaagactggctgtattaccttgctccaaagtccatcacgagctgggatgaccttaagagagtattcttggaaaanaatttccctgcttccaagaacacagccattaggaaggatatctcaggtattagacaactcaatggagagagcctgtatgagtactgggagagatttaagaaactatgt

SEQ ID NO: 16718 - DNA, 412 bp, Glycine max
  unsure at all n locations
agctcgnacccgggatctctaagtcacctgcagcatgctagctttcttatctcgcctatgctagntaccacatgattcgagcagttatcaatatatatttgcttatttaaaaaaatactccatttttttataagatattgcctctcataaaaaattgggcgaattaatctcttaacatagccaaccagcatgagatcatgctctcagacaaaaagatctcacttgctcaatcccagattgatatcttaagatgcattcttctcagggtacttaccagcctcagcctcacatagctcaagagctgttaaatttccctgaagaaaatctcacagttcaacacatccaacaatttttggggattgtaaattatatcagagattttatccccagatcagcccaatataccagttta

SEQ ID NO: 16719 - DNA, 473 bp, Glycine max
  unsure at all n locations
ntagaaggatcactatttctccgtgagagtgtcctacatgccacatagcctcctatgcctacaccaattattgttggataggtatcatcatatttatgctaagaaaatcatgcacatcagaaagaataagttaaaatagtataccaattggtacaatagcaccatctgagccaccacaaagcatcaagtcctgcaattacttacattnttaatgttttcaataaaataactatataattacactaaacttgttntaagaaataaaagattggtaaaatatgagaaatctaccatctaataagcaaatgctgaagtgagatacttacagcttcacctctaatgatatggtttgcagcattcaatatacaaaaattactagtagcacacgctgtagagattgaataaatanggcccatccacccctaaagttttcatatgataaataaataattggttagaagctatatatagac

SEQ ID NO: 16720 - DNA, 477 bp, Glycine max
  unsure at all n locations
tctntanagcaaaagataaatagcaataaataaaagaagtntaatggaagagaggaatgcaaacttgatttatactggttcggccacttctcgtgcctacatccagtcctcaagcaacccacttgagattttccattctctttgtaaaactctttttacaaagtctgaaccacacagggacaaccctttccttgtgttcaggaatcctctataacaagagacccacggtctcttaatcccttttcagaaaaaagaagaagagaagaagaaatctctcttacaagagatagattgtacaatgaagatcaatcaaaattccttattgcatatgcaagtggttgaccaaggaatctntttgagaagataagacagttcagttcagaaaaactcttaatcttttagaaggatanaactgtttgggcaatgaaaactccctttgaatntgtgtttccaagtcacctttgatggccattcata

SEQ ID NO: 16721 - DNA, 457 bp, Glycine max
  unsure at all n locations
tgtgatatctgcanaaaggttgtgtttgtcaattttgggcatgtttattatctcaaccctaaaaatntaagcaatgtcgataattntattaacactacttttcatttcactggtgcagcattaattatgggcttaacattctacagggcattcaaaatgagaacaaaaacttaaaaaaatcactgaaggtaatttaatattagatgttacaattataaacctttctccatcatattttgtggagatattttgcattactactggtatccatctagtttctttaccttgtcatgatttgaattgtggaattgtcacctgtattctttgaattgttnttccaggatgtggttactgagaatgaatttgagaaaaaacttcttgctgatgttattccgccaaccgatattgggtcacatttgatgatattggagctntagaaaatgtgaaggacaccttg

SEQ ID NO: 16722 - DNA, 468 bp, Glycine max
  unsure at all n locations
nggaacannatatttgaattcttggtctccttagagaatttgtaaagatgtctgctagttgatcattagaactaacgaattcagcaataacttccttagaaaggactttctcctggacaaaatgacaatcaatctcaatatgtttagttctctcatggaatactggattagaagctatatgtagggcagcctgattatctcaacatagcttcatttgttgagtatttccaaacttcaattcttaaagaagttgtttaatccaaatgagctcacatgtggctacagccatagctctatattcagcctctgcactagaccttgcaacaacattttgcttcttactcttccatgagacaagatttcctccaatagacacacaatatcctaaagtggaacgcctatcaatgcgtgatcctgcccaatctgcatcgcaaaattcaactatttgagtgtttcctttgtcttcat

SEQ ID NO: 16723 - DNA, 338 bp, Glycine max
ctcgagagcttcctatgtggaatttcgagcgtctcgatatattatacgcctgaatcgaacctcagtgttaaaagttatgaccatttgaatttctgtagagcatccgttgttcattttcgagcgtctctatatgtgatgaaccttaatcggacctccgtgtgaaaagttatgaccatttgaatttctcgagagcttccgttgttcaatttcgagcgtctcgacatattatgcgcccgaatcggacatccatgggaaaagctatgaccatttgaatttctcgagagcttccgttgttcaatttcgagcgtctcgatatattatgcgcccgaatcggacat

SEQ ID NO: 16724 - DNA, 424 bp, Glycine max
atcactcgacccgggatccttaagtcacctgcggctgcaagcttgcttttaattctgatcagaatcaattttctgatcttcaaaacctagctccggcttcctcttccccatatcaactatgcagcttgcggtcaacatgaatggccttcccaatattacagggatgtcagtatcttcagagatatccattaccacaaagtctgtcgggaagataaaatgttttactctgaccaacacatcttcaattactccatatggcctggtaatggagtgatcaactaattgtaaagtcatttgaatgagcattatttcccactcttccaatcttttgcacatggagagtgacatcaaattgatacttggacccaggtcaataaaagcttttcccactttgacttcttcaattgaacaaggaatagttaca

SEQ ID NO: 16725 - DNA, 327 bp, Glycine max
tgtaatcgattacacatatactgtaatcgattaccagaggagatttttatataatattctaaacagtcacgtctttgtctttggttcttgaatggctatgaaaggcctatatatatgtgacttgagacacgaatttgctaagagtttttgtgaacaaaaagatcttattctcttaaaaagcaaaattgttctatcctcttacaaataccttggccataacacttgtgattcaataatgaattattagagtgctcaaattgttcaatctatctctttcagaagaaatacgtcttctcttcttcttattctaaaaaggattaaaaactg

SEQ ID NO: 16726 - DNA, 411 bp, Glycine max
  unsure at all n locations
agaggtcttgtatatttgcatgtaattntaagttcaaaccctcatcgtaagaaaaacactaaacacttatgatataaatttaatactattattttatagtcattgtattcactatattttttattgtcatgttataaatatattattagcagcatataagctatccctatcaagaggaaggggcacacatttgagttcttatacacttagtaactatagattccttactatttggcaatgcagataacgaacgaaccccgactcttcaaataatttttaatatatgacttctactagtgcttaagttaccttcttttatttttgaatttatgttctagctctttagaagacattaaaccacaaatattttctatttttaaaaaaacaacaagtgaatttaatttatattaa

SEQ ID NO: 16727 - DNA, 471 bp, Glycine max
cgtacggttaaagtctcacgatggtcacgtgctcatgcaacaattgttattcgtggctatacgagacatcttgcgaaacaaagtcaggttagcgataactcgcttgtgctttttcttccatgctatatgtagcaaagtccttgatctagtcaagtttgatgagttggaaaatgaggccgcaattatactgtgccagttggagatgtatttccccccccgctttctttgacatcatgattcacttgattatgcatctggtcagagaaatcaaatgttgtggtcctgtttatctacggtggatgtacccagttgagcgatacatgaagatcttactagggtatacaaagaatctatatcgtccagaagcatctattgttgagaggtacattgcagaagaagccattgaattttgttcataatacttacagaatgctatacctgttgggcttcctgagtgtctgcatgatgata

SEQ ID NO: 16728 - DNA, 414 bp, Glycine max
  unsure at all n locations
agctttatcgttattcccaaagcttcatgtagacttgtccagaatcgcgaagtgaacctcggatccctgtctgatacaatactggaaggaattccatgcaaccttaccacttctttgatatacaactccactagcttttccattntatacttcatattcaccggaatacactgagcagatctggtaagtcgatctacatattcagccacatctttcttcctgccatgccaccaaacacttctcttcaaatcttggcacatcttagacattccacgatggaaactaagacgacttttatgcgcttcttccatgatctttactgtcaaatcatctaaagatgacacgcatatgctccccttgaatttaattataccagttgagccctctcgaactctacctccttatcccccatta

SEQ ID NO: 16729 - DNA, 393 bp, Glycine max
tctatagaaggttcattcctaatttctctacaatagcatttctctcaattagctggcgaagaaaaatgtggcatttacctgtggtgaaaaacaagagcaagcctttgctttgctcaaagaaaagcttactaaggcacctattctagctcttcctgacttttctaagacttttgagctagaatgtgatgcctctggagtgggagttggagctgtattgttacaaggtggacaccctattgcttattttagtgaaaaactatatagtgccaccctcaactaccccacctatgataaagagctttatgccttaatatgagctctccaaacttgtgaacattaccttgttgacaaggaatgtgtcattcatagtgatcatcagtcacttagcacatt

SEQ ID NO: 16730 - DNA, 223 bp, Glycine max
gacattatcattattacttcttccacggtgctggaacgtacttacatggacttgatggggcctatgcaactagaaagccttggaggaaaaaagtatgcctatgtggttgtggatgatatctctagatttacctgcgtcaactttatcagatagaactcacacacctttgaagtattcaggatgtgagtcttacacttcaaagagaataggaccgtgtcatcaa

SEQ ID NO: 16731 - DNA, 307 bp, Glycine max
tttcttcactttaggagacggccattccggtgttggagaagatcaacgacaatgcctacaagattgacttgcctagtgagtataatgtaagtgccactttcaatgtgtctgatctatctctttttgatgcagatggcggagccttggatttgaggacaaatccttttcaagaatgagggagggatgaggacataaccaatgaccatgaagcactggaatgtcccatgaccatatgcagacttatacaagcccaacgcgtcatagagacacggctggtcatttgtatcgctgccattgatgatgattg

SEQ ID NO: 16732 - DNA, 443 bp, Glycine max
  unsure at all n locations
tgtgtttgagtgaggtgataccttcttagcatctntgatttcctatacctctcttctcaacccgccatagtaatgagaaacaggagcatgtctcagagtaacaacatacacatcaccaaaataatatcctatagtagataaataatcatattcggatgtgcctaggtaaataacaaatgtataatgattacacctcacagaacaacatgcataaatataccagatctaaacattatgcaagttattctgacctaggttgttgtcaagagtcttggtgaactggtccaaagctggagaaaccttcaacctttgcttcagaatcctcttcgtcctctgaatttgaacattctttggccacttcatgaaccgagtcaagtctctcttcgaggcaacgcccctncgattctgaacctctttgacgcttctcaacagcagatttgaac

SEQ ID NO: 16733 - DNA, 393 bp, Glycine max
agcttaccactataggaagccatggataagagcatgaaggtaggagaagatgagtggagggagaaggagaaaaggagcacgaaattttatgcctcaattgaagtctaaaatttgaagtgtaattctctaataatcaaagttgaaaaaaagcacacacatggcatctatttatagcctaagtgtcacaaaattggaggaaaatttgaatttctattcaaatttcacttgaatttgaaattgaatttgtggagccaaaattttactaattatgattagtgaattttagctatgtttcaacccactaatccaagatcaagtccaagattcctcactaagtgtgcttaagtgtcatgtggcatctaaagcatgaaggacatgcacaaagtgtgacta

SEQ ID NO: 16734 - DNA, 396 bp, Glycine max
agcttgacccttacgagtcagtttagtcaaaggtaaagctaacttggagaaaccttctatgaatctctgcgagtatcctgccaaacccagaaaactcctaatctctaaaacagatttgggactctcccactcaagaacgacttctatcttagatggatctacagctatgcccccttgagatatcacatgccctaggaaactaactttctctaaccgaaactcacacttggacaacttagcatagagttgtcgatccctaagtgtatgcagcacaatcctcagatgttcttcatgttcctctctagtcttggagtataccaaaatatcatctatgaataccaccacaaaactatcaaggtaagggtgaaagactctattcatgtagtccataaacac

SEQ ID NO: 16735 - DNA, 414 bp, Glycine max
agcttaaacattcactttcgagcctctcgatatgttacgggactcaatcaaacatccgagaaaaaagttattgtcgtttgaatttgctcagaggttcaacattcaatttcgagcgtctcgatatattacgggactcaatcagatatccgagtaaaacgttattgtcgtttgaattggctcagaggttcaacattcattttcgagcgtctcgatatgttatgggactcaatcagacatcccagtaaaaagctattgtcgtttgaatttggtcagagattcaacattcaatctcgaacgtctcgatatattacgggactcaatcagacatccgagtaagaagttattggtcgttgaattggctcagagcttcaacattcaatttcgagcgtctcgatatatgacgggactcaatca

SEQ ID NO: 16736 - DNA, 422 bp, Glycine max
  unsure at all n locations
ctgagccaattcagacgacaacaactttntgctcagatatctgattgtgtccagtaatataacgagacgctcgaaattgaatgttgaagctcttagcaaattcaaacatcattaagtatttactcggatgtttgattttgtcccgtcatatatcgagacgctcgaaattgaatgttgaacctttgagccaattaaaacgacaataactttttactcggatgtctgattgagtcccgtcatatatcgagacgctcgaaattgaatgttgaagctcagagccaattcaaacgacaataactttctactcggatgtctgattgagtcccgtaatatatcgagacgctcgagattgaatggtgaacctctgagccaattcaaacgacaataactgtttactcagatgtcggatgggtccgcgtata

SEQ ID NO: 16737 - DNA, 411 bp, Glycine max
  unsure at all n locations
tcagaattcaatttcgagcgtctcgatgtattacgagactcaattattacactccgagtnaaaaagttatttgtcgatgtgaatttggttgagagcttcaacattgcaatttcaagcgtcttgatatattacggaactcaatcagacatccaagtaaaaagttattgtcgattgaattatgtctcagcgtcataattctatttcgagcgtctcaatagattacgggactgaatcagacatccgagcaaaacattattgtcgtttgaattatctcagaccttcagaattcaatttcgatcgtctcgatatattactggtctcaatcaaacatctgaggaaaaaagttattgtcatttgaattcgctgagagcttcaacattcaatttggagcgtttggatgtattacgggac

SEQ ID NO: 16738 - DNA, 394 bp, Glycine max
tgtcaaagctgacaatatcttcagatatgtggacaccgggaatctaatactgacttcccagtaggttcaaacgtgactcaggtgtttgttgatcaactaccgtgactaaacacccttggcatagctttggctcgcatagattttgcaccatagggtttgaacgctccccacactcaccctcgcggcactgagatccttatagtccttgagggtactctttatgttggatttgtgacttccaatcaagatggaaatcgcctcttcaccaaagtgctgaacaagggtgatgtgtttgtgttcccaattggtctgattcatttccaaatgaatatgggaaatgggaatgctgttgccattgctggccttagcagtcaaaatccaggagctatcacta

SEQ ID NO: 16739 - DNA, 398 bp, Glycine max
  unsure at all n locations
agcttgtagtttattcgaacgacaataacatttcactcggaagtccgattgagtcccgtaatatatcgagacgctcgaactttaaaaccgaagctcgtagcagatttgaacgacaatgacatttcactcggaagtcctattgagtcccgtaatatatcgagacgctcgaaatttagaatcgaagctcgtagaaaatacgaacaacagtaacttttcactcggaagtccgattgagtcccgtaatatatcgagacactcaaaatttaaaacccaagctctcaganacttctaacgacaataacttttcactcggaaggccgattgagtcccgtaatatatcgagacgctcgaaatttaaaaccgaagctcgtagcaaattcgaacgacaataacatttc

SEQ ID NO: 16740 - DNA, 468 bp, Glycine max
  unsure at all n locations
ntggttntaaatttcgagcgtctcgatatattacgggactcaatcggtcttccgagtgaaaagttattgtcgttagaattagctgcgagcttcggttttaaatttcgagcgtctcgatatattacgggactcaatcggacttccgagtgaaatgttattgtcgttcgaatttgctacgagcttcggttttaaatttcgagcgtctcgatatgttacgggactcagtcggacttccgagtgaaatgttattgtcgttagcatttgctgtgagcttcggttttaaaattcgagcgtcacgatatattacgggactcaatcagacttccgagtgaaatgttattgtcgttagcatatgctgcgagcttcggtattaatatttgagcgtcttgatatattacgaggactcatcggacttccgagtgaaatgtattgtcggtcaaattgctcgagcttcggtttaattcgagc

SEQ ID NO: 16741 - DNA, 421 bp, Glycine max
  unsure at all n locations
ntaatggcttagtgaggatggagaggtgcaagtaaggaagcaagtagagttggatatttccattggaaagtacaatgataaggtgctntgtgatgttgttcctatggaggccagccacttactcttgtggagaccatggcaatttgataagagggctaatcatgatggtttcaccaacaagatctctttcacgcatcaaggcaaaaagatagtgctcaaaccgttgagtccacaagaagtgtgtgaagatcaaagaanaatgagagagaaaattcttcaagaaaagagagaataagannaagagagccaaacacttgagagttcataaagtgaggacaaaaagagggaaacacaagagaggaaaaagatgagtgaaacatttgaagtgagggagaattntctagctacaaaaggagagatc

SEQ ID NO: 16742 - DNA, 397 bp, Glycine max
agcttgtccgttggatgcctacccattacccattagaaatagactagtagatagggcagcaagaccctgcctacttagcttcttagatgcatactcagggtacaaccaaatacggatgcatccacaagatgaggagaaaacaaacttcataacctagtcgtctaactattgctatcagattatgccattcggcctaaaaaaggctagctccacttaccagcacctaatggacatgatattcaaagaacaaattggaaagaaaatggaggtatatgttgacaacatggtggtaaagtctaatgatgcagaatcacacacctatgactcggaagatatatttgcaaagatctgaaagcataacatgtaactcaattcgaagaagtgtatgtttggggta

SEQ ID NO: 16743 - DNA, 475 bp, Glycine max
  unsure at all n locations
ntgtctttcttagtactcataattctacattaattatttttcttgatgcatgattaacaaaactttaacatgcagaattgataagaggtaaatgtcattgcaacaatactatgtggtacattcttagtatgatcacccctgcagaaccataaagattgtgaataacaagtcaacatcacttagtgccatggcaatggtaaagccaattacgccatttccttaggcctcccacaaagctcttaattctatatatatttataaaaaaataaatcaaatttaaattatcaggtaatatattctattgcattatctattattatttgcgtagccagattataaaattttaattacacatagatatattataaatcatttgagaagtttataattcatttgacaattatagaaaaattagtttccatctactttaaatcttgtaaaatcacacttaatgaatataatgattcaatttata

SEQ ID NO: 16744 - DNA, 458 bp, Glycine max
  unsure at all n locations
tagcattagcatgtgttgacactggatcactaatcattgtgtacgtgtttgttactttagtggatcctatcaaagaacctccgcttataactacaaacatagttctgtctgtttttgttgtgtattgtcatgtggacaaagttccatgccatgtttgagacatctaagattggcgtcttgcctttgcccagtattattttttgcaacatcttcctttcttaaccttgtcattacctcgaaattntaatatggcaacttactcttgtggaaaataatttttaagaattaatataacactttaaaattaaatttagaatattaaaaaaatataaaacatagatataattctttaggtgctattgatacttttctcctgttagaattaaaatcgtacttcagtaatccacataataaagatatacatcataaaattacatcaattatcatagtgaaactct

SEQ ID NO: 16745 - DNA, 425 bp, Glycine max
  unsure at all n locations
agcttttcaattaatctttggctagctacattagtgcaattacccctatcaataatcaaagagcatattttccccatgaccatgcacctagaatgaaaaatgttctccctttaagtttcatctctatccttacacacattacccattaacctcctaaccataaaaagatcaccttccaggggttgtacatcacattcattttcactctcactagaagaactagaccagctagaagaagataaactaatgatatccccattacccaacacaaccatagtccttttgctaggacattgngaggcattatgaccctttcccaaacacttanaacatttaatagaacttacttttgaagaagtaggagtagggttagaaccacaccatactacgagagaggttccctcttttaccatttttaatatccc

SEQ ID NO: 16746 - DNA, 404 bp, Glycine max
agcttgaatttgaacaacagaagctctcgagaaattcaaatggtcataacttatcacacgaaagactgattcaggcgcataatatatcgagacgctcgaaattgaacaacggaagctctcgagaaattcaaatggtcataacttttcaaacggaagtccgattctggcgcataatatatcgagaagcttgaaattgaacaacagaagctctcgagaaattcaaatggtcataacttatcacacggaagtccgattcaggcgcataatatatcgagacgctcgaaattgcacaacggaagctctcgagaaattcaaatggtcataacttttcacacgaaagtccgattcaggtgcataatatatcgagaagctcgaaattgaacaacgaaagctctcgagaaatt

SEQ ID NO: 16747 - DNA, 439 bp, Glycine max
  unsure at all n locations
tctggatatattatgcacctgaatcttacttccgtttgaaaatctatgaccatttgaatttctcgagagattccgttgttcaattccaaccttctcgatatactatccgccggaatcggacttccgtgtgacaagttatgaccatttgaatttctcgagagcttccgttgttcaatttcgagcgtctcgatatattatgcgcttgaatcggacttccgtgtgataagttatgaccatttgaatttctcaactgcttccgttgttcaatttcaatcttctcgatatattatgcaccttaatcggactaccgtgtgaaaagttatgaccatttgaatttctcgagagcttccgttgttcaattccgaccttctcgatatactatgcgccggaatcggacctncatgtgacaagttatgaccatttgaagttctcgagagct

SEQ ID NO: 16748 - DNA, 428 bp, Glycine max
  unsure at all n locations
ctcgagctcgcgcccgcgtgatactctacactgcacctgccgcattcagcttatataaatcttaanattcagatagtctaatgaaaaataaactttccacttgatatcgggtatcaagaattaaaatttaaatcacattaaaatgaaacttgagaaacaaaatatgaaagcaagaagtataaataagaaataaattgaatatttacctatatatgtgtaaatatttctgtaaaagatcaaaaatataatactttaatatatgggttaaaatatacaagaatgtatagcattggaacaattgtttaagttatttgatatgataaacatattgtttttactttctgtaaatcatgatccataacgttcatgttatgaatacccataacccagtgaaaacaatattttcatcgtattgcaagcagcgccaa

SEQ ID NO: 16749 - DNA, 383 bp, Glycine max
agcttcaatggcttagtgaggatggagaggtgcaagtaaggaagcaagtggagttggatatttccattggaaagtacaatgataaggtgctttgtgatgttgttcatatggaggccagccacttactcttggggagaccatggcaatttgataagagggctaatcatgatggtttcaccaacaagatctctttcacgcatcaaggcaaaaagatagtgctcaaaccattgagtccacaagaaatgtgtgaggatcaaagaaaaatgagagagaaaattcttcaagacaagagagaaaaagaaaaagagagccaaacacttgagagttcaaaaagtaaggacaaaaagagggaaacacaagacaggaaaaagatgagtgaaaca

SEQ ID NO: 16750 - DNA, 389 bp, Glycine max
  unsure at all n locations
agcttcttattttcagaagatgaagatgaatccgtggccacatcatggacttctctaaggacaatagcatcatttcttgcactgaattgttgggagttggaagcaatcttctcaatcagattcctagcctcaacaggagtcatatcaccaagagctccaccattggcagcatcaatcatactcctttccaagttgctaagtccctcatagaaatattgcagaaggagttgctcagaaatctggtggtgaggacagcttgcacacaatttcttgaatctttcccagtactcatacaagctctctccactaagttgcctgatgcctgaaatgtcttttctgatggcagtggtcctagatgcanggaagaatttctccaagaacaccctctt

SEQ ID NO: 16751 - DNA, 369 bp, Glycine max
  unsure at all n locations
agcttaatgtatccacaagaaaagaccattacccgcttcccttcatggatcaaatgcttgagagacttgcaaggcaatccttctactgtttcttggacagatactcaggttacaatcagattacagtagatcctcaggatcaagaaaaaacagcgtttacatgtccttttggtgtttttgcttatcaccgcatgttgtttggtttatgtaacgcccctgctactttctaaagatgtatgatggcaattnttgatggcatggtagagaaatgtatcgaagtctttatggatgatttttcggtcttcggtgcatcttttggaaattgcttagcaaatttagagaaagtgttacagcgttgtgaagaatcta

SEQ ID NO: 16752 - DNA, 321 bp, Glycine max
taagcttgaaggaaaccttgatgccttggtcaaccaagtaactcagcttgccatgaatcagaaatctacacctgttgcaagagtctgtggtctatgttcttctacagatcaccatacagatctttgtccttctttgcagcaatctggagttaatgaacaacctgaaacttatgctgcaaacatttataatagaccccctcagcagcaaaaccaacctcagcagaacaattatgatctttcaagcaacatatacgatccaggttggaggaatcatccaaatctgagatggacaagtcctccacaacaacaacagcctgtccc

SEQ ID NO: 16753 - DNA, 366 bp, Glycine max
  unsure at all n locations
tcaacatcagaccacttccgggtgctgtaactacttttcatggacttgatggggcctatgcaagttgaaagccttggaggaaaaaggtatgcctatgttgttgtggatgatttctccagatttacctgngtcaactttatcagagagaaatcagacacctttgaagtattcaaggagttgagtctaaggcttcaaagagaaaaagactgtgtcatcaagagaatcangagtgaccatggcagagagtttgaaaacagcaagtttactgaatactgcacatctgaaggcatcactcatgagttctctgcagccattacaccacaaacagaatggcatagntgagaaggaaaaacaggactttgcaag

SEQ ID NO: 16754 - DNA, 402 bp, Glycine max
  unsure at all n locations
agcttccattntcaattacgagcgtctcgatatattacgggacccaattggacatgcgagcacaaagttattgtcgtttgacttttctcagagcttttattctgaatttcgagcgtctcgatatactacgggacacaatcggacatccgagtaaaaagttattgtcgtttgattntgctcagagcttctgttctgaatttccagggtgtcgatataccacttgccaccatcggacatccgagtaaaaagttattgtcgtttgaatttgctcagagcttttgttttcacatttgagcgtctcgatatataacgagactcaatcggacatccgagtaaaaagttattatcgttagaattggctcagagcttccattntcaattacgagtgtctcgatatattac

SEQ ID NO: 16755 - DNA, 367 bp, Glycine max
  unsure at all n locations
tcaagcttttgtgtgggatacctaatgtgagcatagtttccaaacccttaaggaaaagttgacggccgctcccatgctagttntgcctaacccaagagaaccccttgaggtgtattgtgatgcatcaaagatgcgtttaggaggagtgttgatgcaaaatggccaaggagtggcctattcttctagacaactcaagactcatgagaggaattatcccacccttgatctggagttggctactgtagtttttgcccttaagatgtggaggcattacctgtttggctccaagtttacagtgttcaaggattataagagggaccatgacacanagatcctncacaaagaatttagtcccagacaacaagta

SEQ ID NO: 16756 - DNA, 383 bp, Glycine max
tttagcttatgaatatcagatcgcaccttcgcttctaaatgttcaagaatctcttgatccgtgggatcaaacttcactccagcaggcagtccaggtaagtcatgaattccaccaccctaaaattattcaacaccacaatatttatttaaataattttttcataaagaacgccaaaaaaaaaaatgaaaaatgaatcaaactaagacaattacatcaaaagaaaaaaaaagtactcaaaagggtaatattatctatatgatatatatcattaacaaaaaggttaataattaagaacctgatcttggcatttgatatgatgaccacacgtaggacaagttctaattaagctatcttttcgtccctccactatgatgttatgatga

SEQ ID NO: 16757 - DNA, 435 bp, Glycine max
tgcaattgccccagtaatgatcgcacttgacctgagtttagaatttgaattgatgtgtgatgccaatgattatgcagtgggcgcagttctaacacaaaggcaagacaagatattccatgccatttactatgctagcaaggtcctcaatgatgcataaatgaattatgccacaaaggagaaggagatgctagctattgcctttggcttggagaaattcaagtcatatttggtaaggtcgaaggtaataattttcaccgatcatactgctatcaaacaccttctcaccaaagtagattccaaaccatgactgattagatgggtcctgcttatacaagagtttgatatagttatcaaagacaagaagggatctgggagcgtggtggctaatcacctctcccagttgaagaacgaaagagtaactaaagaagaaccgaa

SEQ ID NO: 16758 - DNA, 379 bp, Glycine max
  unsure at all n locations
agctttatttttgacaactaatattgntaattgatgaccgcgatgcatgtttgtgccatatcattgacaatgtttcataatgcaaaataatttattcttttgcagcattgtgatttttcaatcacacttggatttggataggttccaattaaggcaaaaattattatatttgcttgatcaactaaaatgttctttgtacatatttttctgtgtatataatattaatttatgtatatctaatttgtaatatttctgctatttatagttattgtattttattaattatcatgtgatgtctcgggtattatttgataggattttttatcattctaatcacattggtgatgatgctaatttaactgtgattctatatttctga

SEQ ID NO: 16759 - DNA, 331 bp, Glycine max
ctcaagttttagctggacaattccgcgagcctcgatatattattcccctgaatcgcacctccgagtgaaaatgtatgacctattgattttgctaagagcttgcgagctcatattcgagcgtctcgatatattatgcccccgaatctgaccttagcgcgaaaggttatgaccatatgaactcctcgagagcttgcgttgtctaatttcgagcggctcgatatattatgcacctgaatagggtctccgagggaaacgtcttgaccatttgaatctctcagagctcgcattcatcagttttaccgcctcgaatattatgcgcctgaatccgacc

SEQ ID NO: 16760 - DNA, 429 bp, Glycine max
  unsure at all n locations
tttgatggtgtcgagaagaaatcacatgtntgtcattttcattttaggggagaatgtgaatgtatgtatacatgaatttgatgatgtcaaagaagaatctaacaaggctgcttcaaatgataagcatttgcttcaagaataattcaagattgcttcaacaaacaaagccttgtttcaagattcactaaagaccaagccttgccttaaaacaaagtgctttcaagacatgcaaggctctggtaatcgattaccaggaagtgtaatcgattaccagaagacagggttgagaaatagctgttgaaaaaggttttgaatctgaattttcaacatgtaatcgattaccatatgtctgtaatcgattaccagcaacgaaactttggaaattcatattcaaagtcataaccctgcanattataactgtgtaatcga

SEQ ID NO: 16761 - DNA, 353 bp, Glycine max
  unsure at all n locations
tagcttggcgacaatgagaggttttgagtcggagtgcaaaatcaaggtgaaagtctcgaggatgagcctggcttgctcaatggagatttgaagtgactcaaagattgtcgctaagtcgactcattggttggaggaagacttgagaagcttctacttcagtggaattagggtttgtgccaggtcaaagaagatgagacgcaggattggcaaaaggccatgcttgaaggattcgcgccttgggtgaatcatggtggttgggtcccttgccaatgaagatggcatgcacgacaaaggaggtcgaggagctaggagggggaaaagtctatggggaagaggtggtangtggcggaaat

SEQ ID NO: 16762 - DNA, 398 bp, Glycine max
  unsure at all n locations
tctgcttgaaggtaaactanatgccttggttaacctggtaacccaactggccgtgaataaaaaatctgcacctgtcgccagaatctgtggtctatgctcctctgtcgaccaccacacagacctttgcccttctgtgcaacaatctgaagcaattgaacaacctgaagcttatgctgcaaacatctacaacaaacctcctcaacctcaatagcaaaatcaaccacaacagaacaattatgacctctccagcaacaggtacaatcccggatggaggaatcatcccaaccttagatggtcgaatccttcacaacaacagcaacaacaaccttattttcaaaatgatgctggcctaagcagaccatacgttctttcaccaatccagcagcaacaacaacaac

SEQ ID NO: 16763 - DNA, 390 bp, Glycine max
  unsure at all n locations
agcttgacggagtttggcgcatcggggaacaatttcactttaaaagtgggtcccaattggattcccaattttcaacttacctatttggaagtgacatcatggccgctatgtcccagctatccattgtggattcagtcacaaaacaaacttgaatatgttggactatctaacacggngattttcgattctatttccacacagatgtgggaagcactttctcaggttttgtatttaaacctctctcgtaatcatatccatggtgagattgcgactacattaaagaatccactatctatcccaactattgatctaagctcaaatcacttgtgtggtaaattaccctatctatcaagtaatgtgcttcagttggatctttcaagcaattcattc

SEQ ID NO: 16764 - DNA, 414 bp, Glycine max
  unsure at all n locations
tagagagattcccgatctgagagggttctgttctgttttcaacaacataactcaggtcaagatacaccaaatttgagagattcccaatctgaggaggaatcttcccgtggattccagtatcagagaggtctaggtgagtcaaggagctcattgcacaaaggaaagaagaaattgccataccttctccaagtaaatcattgtagctcaagtcaagatatcgaagcttagagagattcccgatctgaggaggaatcttccccatgaatccagtaagagcgaggtcgaggtgagtcaaggaagtcattgtcccatggaaagaaggaattgacataccagctccaaataatatattgccgctcaagtccaagtaattcaaatgttntaaatcagccaaacaaggacttatctctccac

SEQ ID NO: 16765 - DNA, 389 bp, Glycine max
ttaagtttattaagtgttgatgattataacacatatatatctatatgaattgttaaaataaattacgaattaatagttcaaataataaaattaaattaaaggaaattaatatattaagattcaacgataaatacttttaatgcatttttagtttaattatttattaactatttttaattgaaaaaaatatagtttgatttaatatatacatgttttgtgccatgtaaatattaatattctgtgatgtgtatatttttcataaggtgtcataacatgttgcataggaattataacattgtgattgagattggatgtatgtgataaatcgagtatgtgttgaattgaagatacatgtgtataagatcttgacgcattgagttgtgagctat

SEQ ID NO: 16766 - DNA, 437 bp, Glycine max
  unsure at all n locations
nttaacccctttctaaatgataggctcaaaattttgataaatattccttttcaaaatggtttgaagagatatgtcttttcaaaaagctttttctgaacttcttcactggtaatcaattacaggtttctggtaatcgattgcattattatattttgaagggtcatgacttttgaatttgaatttcaagagtttcattgctggtaataaattacagacatatagtaatcaattacatgttcaaaattcaaattcaaaacccttttcaacagctatttctcaaacttcccatctagtaatcgattacactgcctggtaatcgattaccagagtcttggatgactttgaaaccctatgttttaaggcaaggcttgatcttgaagaaatcttgaagcacgactctgtttgttgaagcaatcttgtattaatcttgaagcagt

SEQ ID NO: 16767 - DNA, 426 bp, Glycine max
  unsure at all n locations
tcccactgatgagagtctgctcactcatgttgtcacttttctaatgattntttccccttttggattgacaaatataggttgttttttgtgtatatttcgtctgattggtttgtatcattgatttctctttgcagataaaggatggatttgctgagggcaaggatcttgttgtgtctgtcatgtctgctatgggtgaggaacagatttgcgccctgaaggatattgggccaaagaactagcttttggtgctggcagcctgttgtttctatttaagcaaagatccttttgtaagcctttatattggtttgttcaagacctggcttatggcttatagattctagtcagactagtcttaacaatggtgtttatggatgtggtcacagaaactatatcacattttttctggttttctatgctgtcctatga

SEQ ID NO: 16768 - DNA, 436 bp, Glycine max
ctataaaactcagcttacaaggctgcgagtggggttttttttatcttttcccttatgttatcaaacataaaaagggaaaaggtaatattgtagccgatgctctttctcggcgtcatgcattactttctatgcttgaaacaaaattgattggtcttgaatgtttgaaaagcatgtatgaaaatgatgaaacttttggagaaatttttaaaaattgtgaaaaattttcagaaaatggtttctttagacatgaaggctttcttttcaaagaaaacaaattgtgtgtgcctaaatgttctactagaaatttgcttgtttgtgaagcacatgaaggaggtttaatggggcattttggggtccaaaagactctagaaacattacaagaacatttttattggcctcatatgacataggatgtgcagaaattttgtgaacattg

SEQ ID NO: 16769 - DNA, 432 bp, Glycine max
taggcctagaggggatggaccttttcaggttttggatatgatcaataacaatgcctacaggttggacctcccagaagagtatggagtcagcaccacttttaacatttctaatttaattccttttgcaggtggaactaatattgaggaggaggaactaacagatttgaggtcaaatcctcttcaagggggaggggatgatgcaatcctccctaggaagggaccagtcactagagccatgagcaagaggctccaagaggattgggctagagctgttgaagaaggccctagggttctcatgaacctcagggtagatttctgagcccataggccaaggttgtgtccaattatctttgtacatattagattaagatgtcattatattttgtctttgtatttagggctccatgatgtaggtagggtaccctagaaata

SEQ ID NO: 16770 - DNA, 402 bp, Glycine max
tctgcttctattgctcttcttcatctttacttgggctatctcagaccttttatgtttgttgtctaagattttgcatacacctccttcaaagtgaagtgtgtagcttctctccatcatttgaccaatgcttagaatattttcttttaggctgggaactagtaagacatcatggatgagtcgcatacctttatctgtctccaccatgacagtgcctttgccttttgattcaaccacacttccatttcccagtcgaactttgactttgacagactcgtcaatgcttttgaaaatagtctcatccttggccatgtgattgctacatccactatccaagtaccagcttcctcccttttcttttattgagtcttgagtggcatagaacgtacattgttcttgatcatg

SEQ ID NO: 16771 - DNA, 342 bp, Glycine max
  unsure at all n locations
agcttcataatgattagatcattatgatgcaatcctatcccccaagggcattggatagaagactccaagaagattgggccagagatgtaggagaaggccctagggttctcaagagccttaggatagattttgggcccatgggtttagtatgagaccacttatctttgtacatattagattaaggtttcattatttttgggccttgtatttagggttccatagtgtagggaggctaccctggtaatataggattttttagcccttgtaatttatggcacctagactagtttttgtattaagggtagttntgtaattttacatgcattaagtgcactatttgat

SEQ ID NO: 16772 - DNA, 400 bp, Glycine max
agcttgtacattcaatttcgagcgttccgatatattacgggactcaatcggacatccgagtaaaaagttattgttgtatgaatccggacatagctgcaacattcaatttcgagattttcgatatattacgggactcaatcacacatccgagtaaaaagttattgtcgtttgaatttgctcagcgcttcggtattcaatttcgagcgtctcgatatattacgggactcaatctgacatccaagtaaaaagttattgacgtttgaatttgctcaaagcttcggtattcaatttcgagcatttcggtatattacgggactcagtcgaacatacgagtaaaaacttattgtcgtttgaatttgctcagagcttcaacattcaatttcgagcgttttgatatatt

SEQ ID NO: 16773 - DNA, 410 bp, Glycine max
tgtcctcggtgacgaagacaattgaataagcctctttttgcttttcacaggcgtcaacgattctcaaaatgaagggtctgtgtttggaagtggcgatgaggtggagaacaacctcggtgtcggaggtagtgttgaagatggacccgctgtcctcgaggttggttcggagggtgcggtagttgacgaggttgccgttgtgggccacgccgacggagccgaagcggtagccggcaacgaagggttgcacgtttttgagcatggattggccggcggtggagtatcggacgtggccgatggcgaggctgccggggagctggtccagcttcgactggttgaacacgtcggaaacgagaccaacgccggtgatggattggaggacgttgttgtgaaccgtaacgattccggcgcct

SEQ ID NO: 16774 - DNA, 432 bp, Glycine max
tctcaaagatgtacttaaccaggtccatcttgttatatttaccaggtggtatggctcagcatgtattgtcttagacggtgggacgcccagactaaagcacaacacgttctttcgagcagggagtagttcatttcataggccgtgaactttttactcaagtagtagacagcgcgttctctcttcccggactcgtcatgttgccccaacatacatccaatcgactcatccaaaatcatcatatacaagatgagaggccttcctggtaccaacgacataagcacgagagggttcatgagacactgtttgatccttccaaacgcctcttgacaatcctcattccaacggacggattggtttttgcgtaagagttggaataacggctcacaattagcggtgagttgtgatatgaatctggcaatataattcaaacgt

SEQ ID NO: 16775 - DNA, 424 bp, Glycine max
  unsure at all n locations
atgctggtgtaagaaccgtgttttcattttgtttcttatgttgngatccttgatcatcaatcatttctttctggaatagctgatgttcgtgatcggcacagggatatgcgacttgatgttgataacatgtcttatgaggtaaaatctcatttctacatctggatggaaatattaatatatctatacaaccatagtgtcagtttatcccttatatttcaagtcagtgcttcgctttagagagtttctcatgtgacattcgtgactataacaggagttgttggctctggaagagcgcattggaaatgtgagtactggattgagtgaggaaactgtattgaaacacttgaaacagagaaagcactcggctganaaagggcctcagattgatgcagaaccctgttgtgcttgtcaggtaaacctgact

SEQ ID NO: 16776 - DNA, 433 bp, Glycine max
  unsure at all n locations
tgagcatgtcaacatgaagcatatntcttaactgtcgttaactgatttactaaaaggactacccaagatttgttggaaaactcatcttctttgtgaagcatgttataaagggaaacaaatcaaaactacctttaaatccggagatattgtttccactaccagacctttgcaattgttacatatggacctatttggacctacaagaactttgagtctaagaggaaagaaatatggctttgtcatagttgatgactattctagatacatgttggtatagagaaaacggttataactgtctgtaatttattaaatctataaggtaattgattattgtaacaaagttaccaattagattatctaagtaatcaattaaagtgttcatccaatatatggaaaacaactcaagaacaatgtaatcaattatatgacctga

SEQ ID NO: 16777 - DNA, 400 bp, Glycine max
agctttttatgggagtcaagaaaatgaaagtgctccgaaaccattagctggaaaagaagattatgatcgggtcaactacatcgtaactatctttgggaagacccaaaagaagccatcatctgagctaaacatatggaagaaaaggtcaatattctttgatcttcgatactggtccgatcttgatgttagacattgtatagacgtgatgcatgtggagaaaaatgtctgcgatagtttaattggcactcttcttaacattaaaggctagacaaaggatggtttgaagtgtcgtcaatacttggttgagatgggtatacgagagcagttgcatccgatctcacaaggtccacgaacgtatctgcccccagcatgttagataatgtcaacaaaagagaagtga

SEQ ID NO: 16778 - DNA, 402 bp, Glycine max
  unsure at all n locations
tagcttctatactttatacaagaatgaagctctgataccacttgttagacgagtggcctcagatatcttatgaagggggggttgaattaagatattccaaactacttccccaattaaaatctatttcactttttattcgagttataaattcccttaataatgaacttcttaaatattgattcaaataaaacaatttgaatatgaatataaagcaataataaacaaaggagattaagggaagagaaaatgcaaactcagatttatactggttcggccacacccttgtgcctacgtccagtccccaagcaacccgctngagagttccactatcttgtaaattccttttacaagttctaaacacacaaggacaatccttcctttgtgtttagaattccattacaa

SEQ ID NO: 16779 - DNA, 428 bp, Glycine max
  unsure at all n locations
tctggtgggacatcttgacttgctttccaatctgactttcaccacagattctgccttcttctattttcagattgggaatgcctctaacagcacctttgtcaatgattttcttcatgcctcttaagtgcagatgtccaaatctttgatgccatatattgacttcatcttctttggagactagacatgtggaggagtaactggtttcttgaggtgtccataggtaacagttgtcctttgatctgctgcccttcattaggacttcactcttctcatttgtcaccaagcattctgactttgtgaagtttacattgagtccttcatcacacaactgactgatgctgatcaagttcgcagtcagtcccttcaccagcagtactttgttcagactangaagtccttcatggactagctntcccattccagtgatc

SEQ ID NO: 16780 - DNA, 412 bp, Glycine max
tccgcttattagtgcacaactccttctttaatttagcatatcttggaattttctttattgcatccagcagagatatgtttacctctacttttctaaatgtttctaatatctccttctctgcctcttccatttttttgttggaaattgctctttgagggaatggaagagggatatgttgcttttgtaaattagaattaccagtggaagattcacctgcatagaaattgttaggtaacttactctttaaatttttgtcatcatctttttctggagtagagtgaggttgggtaggttcatttgcggatgaggaagatgctactggttaaggtccttgacactgctttcctgacctcaatgtaatggcactcacatttttgggattctggacagattgagaaggtaatcagtcaga

SEQ ID NO: 16781 - DNA, 428 bp, Glycine max
  unsure at all n locations
tataagaacaaaatngcctaatcattttcttttgtatgtgaattacgacgcatcaaaaagaatcaagccaaggctattgtgcaagcaatcaatggggcaaaacacaccaaattattatgatgatggatggctcaaattctcacaaaggtaaactcatcactttcaaattgagctttcaaaactatcatgacatgtagagaagaatcaaggatttctactgtggcatttagttttggggtctagggtggggtagtgaagtgagtcataccatgatggttcaaatagattttttacttaatagattcacctccattattagagtaaaatgagacaagtgaggtattgaaatatttttcatgcaagactctaaattttggaaaaatagaagagacatctaatttattctttaatggatacaaccaacaata

SEQ ID NO: 16782 - DNA, 439 bp, Glycine max
tgtgcatccaatagcttgatgaggatgtcccttatgttcttaaaactagactgatccatttgcttccaaagtttcatggccttgcaggtgaagacccgcacaaacatctgaaagaattccatattgtctgctccaccatgaaacccccggatgtccaggaggatcacatatttttgaaggcttttcctcattctttagagcgagtggcaaaggacttgctttattaccttgctccacgatccatcacaagctgggatgacctcaaaagagtattcttagaaaaaaaatttcctgcttccaggaccacgaccatcagaaaggatatttcaggcattagaaaactcagtggagagaacttatatgaatactgggagagatttaagaagctatatgccagttgcccgcaccaccagatttctgagcagcttcttctccaata

SEQ ID NO: 16783 - DNA, 337 bp, Glycine max
cagtttttggtagacctacactagcggtgatgcactacgaggttgatcctaatgatcctgatccactcaaggatttattacggctacgtgatcaacttttgagcaagctgaaaagtaatttactaaaggctcaacaatatataaatatgcgagctgattagaaaataagagatgtgccatttaacgctggagatatgattttagttaagctacagccttacatgaaacaatcagcggctttgaggaagcatcagaagctatgcatgcgctattttggtgcgtttatagtgattgaaaaaattggtacgattgcatataaagaacaactgcctgagtc

SEQ ID NO: 16784 - DNA, 441 bp, Glycine max
  unsure at all n locations
ctcagctgaccagaattattgatgggtaggtgtgaatttttttgttcctgttgcggagatgatcgtacagcgggtgaaccataagcggaagtttcttttggtgaggtagccatggaaaagcatagcgtttggaatgatttcgtatatctcagaaggctattgggaaatgctggttaaaacacgaatgccaagcagatataaattttaatgaagaatgtatatgggcgtgtgacgcaacggtcgaatttgctttgcggtgaacgtgctattaatgttaagtgattcgtttgggcacgttcagattgcagtagctgctataatttctctagcagacaaatgcccatcttgcccctcagtttttcaaactgattagcatccaaagcctttgtgaaaatatctgctattngctgctcagtgtcaacatgctctagtgtgatcact

SEQ ID NO: 16785 - DNA, 394 bp, Glycine max
tttcttatgctgcaaacatttacaatagacctcctcaacctcagcagcaaaatcaaccacagcagaacaattatgacctctccagcaacagatacaaccctggatggaggaatcaccctaatctcaaatggtctaaccctcaacaacaacaacaacaacaacaacagcctgctccttccttccaaaatgttgttggcccaagcagaccatacattccttcaccaatccaacaacagcaacagccccagaaacagccaacagttaaggctcctccacaaccttccctcgaagaactcgtgaggcaaatgacgatgcataacatgcaggttcaacaagagaccagagcctacattcagagcttaaccaatcagatgggacaattagctacacaatt

SEQ ID NO: 16786 - DNA, 395 bp, Glycine max
ttgcttttcactttataaagggagagtttagtatgaattttgatgataccatctgatgtaattctaccccccaagggtattggataaaaaacttcaagaagattgagccagagatgtaagagaaggtcctaggattctcatgagccttatggtagatttcggacccatgggctaagtatgagctcacttatctttgtacatattagattaaggtttcattatttttgtgccttgtatttagagctccataatgtagatagggtaccctagagatataggaattttcaacccttgtattttaaggcacctagactagtctttgtattatgggtagttttgtaatttcacttgcattaagtgaatatttgatgtgtgtgttgggaaataaatttaat

SEQ ID NO: 16787 - DNA, 393 bp, Glycine max
ttgcttgtttagtgattttaagcttttccttcaagacatatgcactttgtccctccacttgagagttctgccatatctctttgactacctcatgaaaagatggatcttataaccaacaagtgagcattctaaatggttctggaccccaatcatagttgttatttttaaccaagatagggcaatgatccgaaacgtctctatttagaacctcctgtattaatccttgccaaacatctagccaccccttagtgcatatgactatatcaattcagcgtttagctccccatttatacaataccaagtgaatttgtggttgatcatatgaacatctaaggatttcaagttttcatataggcattgaattcctctatttcctatgtcaactatttctac

SEQ ID NO: 16788 - DNA, 377 bp, Glycine max
  unsure at all n locations
agctttcttggaaaatgttattgttttgaaggcaatgcttagaggctttgagatggcctctggtctgaaaatcaactatgctaagagtcaattcggaatttttggagattatgttaactggtctcaagaagctgctcactttctgaactgtagacagatggagattcccttccactacttgggcatccccatttgggtcagatcctcaaatcaggtggtatgggagcctttgatcagcanatttgaagctaaactcactanatggaaccagaaaagcttatctatggctggcagggttaatctgataaattctattttgaacgctntaccaatctatctattatccttctttaagttaccccaaagaatagctgata

SEQ ID NO: 16789 - DNA, 443 bp, Glycine max
tgcgtcacaattcattgtgacagtcaaagtgccattcacttagcaaatcaccaaatgtaccatgagaggacaaagctcatagatgtgaaactacacttcatcagatatgtgattgaatctgagaaggtgaaggtagagaaggtttcaacataagacaacccgactaatatgttcacaaagatcctctctagtgtcaagttcaagcactgcttggacttgataaattgtgaagatgcctaaagcacattggttgaagtgcagccttgaatcacaaggtacacacttgctgatttagagtcaaagtggagatttgaggtgtgtgactcagaatcacaaatgacacaagtgataatactatagagtaatgatgtcataactgttttcacttattataactgaattgggtttggcaccaaagcatagctagagtgttcatatatatt

SEQ ID NO: 16790 - DNA, 393 bp, Glycine max
agcttgtatggttaaagtctcacgattgtcacgtgctcatgcaacaattgttagtcgtggctatacgagacatcttgccaaacaaagtaaggttagcgataactcgcctgtgctttttttttccatgctatatgtagcaaagtcattgatcctgtcaagtttgatgagttggaaaatgaggccgcaattatactgtgccagttggagatgtattttccccctgctttctttgacatcatgattcacttgattgtgcatcaggtcagagaaatcaaatgttgtggtcctgtttatctacagtggatgtacccgattgagtgatacatgaagatcttaaaagggtatacaaagaatctatatcgtccagaagcatctattggtgagaggtacatt

SEQ ID NO: 16791 - DNA, 424 bp, Glycine max
  unsure at all n locations
tgttgtcattaaatcttacatgaattgtctcttccatagtcaaggtttntgatttgtacactctatatgccttggatgattcaaagtatccaatattccaaaatcacattttgagtcaaactttccaaggttatccttggtgctgaagatgaaacactggcatccaaatgggtgacagtcataaatgttgggcttatgtccctcccacaatacataggaagtcttttttaagattgaccttatataaattatgttctgtaaataataagcagtgattgctgcttctgcccataagtgtttcagagttaagtagtcgttaagcattgttcttgccatttcctgaagagatccatttttcctctcaacaactccattctagtgggatgttcttggagtacacaaattattataataccattctctt

SEQ ID NO: 16792 - DNA, 243 bp, Glycine max
agcttgtatgctaactggatgcattggttaacttggtaacccaactggccttgaaccaaaaatctgtacctgttgcaagggtctgtggtttgtgctcctctgctgaccaccatacagacctttgcccttccatgcaacaacttggagcaattgagcagcccgaagcttatgctgctaatatttacaatagacctcctcaacctcagcagcaaaatcaaccacagcagaaaaattatgacctct

SEQ ID NO: 16793 - DNA, 386 bp, Glycine max
  unsure at all n locations
ttgcttgtgcatccaataccctgatgaggatgtcccatatgttcttaaaactggactgattcatttgcttccaaagtttcatggccttgcaggtgaagacccgcacaaacatttgaaagaatttcacattgtctgctccaccatgaaacccccagatgtccaagaggatcacatatttctgaaggcttttcctcattcattagagggagtggcaaaggactggctgtattaccttgctccaaggtccatcacgagctgggatgaccttaagagagtattcttagaaaanagtttccctgcttccaggaccacagccatcaggaaggatatctcacgtattagacaactcagtggagagagcctgtatgagtactgcgagagattta

SEQ ID NO: 16794 - DNA, 392 bp, Glycine max
  unsure at all n locations
ttttgcaagcttggagggtatccatggatcttgaagcatttttcctttgtgtgtccatggatgttgcaatgagagcaaaacggtttatccttgcgagtaggttttcccttggcattggattgggttacaacacaagccatttcagcaggaggagcataattgggttgaacaccaacaagcctatgagtttcatcttgaagaaataatgagaaggtatcatcaatattcggagtcggtttcatcaacaatatttgacctcaagcatgggcaaaactctctttgacccccatcagaaatgacatgacaaattccnctttgatggaagcaagaagtggagcaaccctgccacaattacaactatgattggccttgagttcacccagcttagccca

SEQ ID NO: 16795 - DNA, 383 bp, Glycine max
  unsure at all n locations
ttgcttttatcttacaccaccaccgccgccatcatcttagaattatattttaatattattattactactttgattttcagccttgtattttggttatattattatggtatttgaacaatttactatttccttatttgcatggtatgtttggaccaatattaagtatgttatttgactatgtgaagtttataattaatctattcatggttgcttgcttcatggttttcatggttcttgcttcttgcttcatgatttggttgatattttttcatgaacattgtatgaatgtttagttatattntaatacgcactttcgctttttgttgatgccaaagggggagagaaatgggattaaatcaagaactcacatgagtaattaattt

SEQ ID NO: 16796 - DNA, 376 bp, Glycine max
tgctttcaactgaatttacaacgttctaattaatttcaaaatggtgtaatcgattacaatatattggtaatcgattaccagtgtgtttgaacgttgaaattcaaattcaattgtgaagagtcacatcctttcacaaaaatgttttgtgtaaacgattacaatgatttggtaatcgattaccagtgataagttttgaacaaaaatcaaaagatgtaactcttccaatggttttcaagtttttctaaaggttataactcttctaatggctttcttgaccagacatgaagagtttataaaagcaagtccttaacttgcatttttaagaagaacaatcattacaatcctttacaatctttgaatctctttgaacatcttc

SEQ ID NO: 16797 - DNA, 411 bp, Glycine max
tcagaaccacttcagaataaagcatttggcattcccagaccacctggtcctacaagatctgttagcatggacctctccaaggcaccactggaatcagcttcatctgttgatctttttcagttaccagcagcaccatctcaagctccaacattggatttgtttcaatcatctctttcatcggcagatccatctttcaacgagaatcaacttagtcaaacatcccatcttgcatctattgattttttttccgatttttctccgcagccttctactgtaacctcagatgggaaggcactggaattatctgtccctaaaaatgaaggatgggcaacttttgatatgcctcagagaacctcctctactgcacaagtggaaattccaaccactgtaccctcaaatgctaaatcttta

SEQ ID NO: 16798 - DNA, 384 bp, Glycine max
  unsure at all n locations
agcttgcagagaaaagcagcatggttgtgatctgtggtgggatcaacaacaaattagctcagttgttgcacaacatatgtaatgtctggccttgtgttggtcaaatagatcaacctccctattaatctcctataagaggaaacatcttctgctgaaataggtgaccctgagtgttgatgcttggtggtgtaatcacaaggtgtagaaactggcttagaaccaagcatgtcaacattattgagaatgtccagtgcatactttctttgatatagatttataccaatagagcttctagctacctcaaaccccagaaagtacctaaagtctcctaagtccttaattttgaaagcattgtcaagtagatntgtaattctttgaatttta

SEQ ID NO: 16799 - DNA, 420 bp, Glycine max
  unsure at all n locations
ntgtcctttggaaggtgtgatgttntattagggacttctgaaggtttttgaaagcttgaaaacgtagtgagtttagtctgttttcgttccatcaatgaagtatcacgcctaagatgggaagttgttgcaggagcacggttttcaccacctgaagtaccagctgcgaccatagccaatgccattgaagcaggtggagatgcaaaagcagcagcccaggctggagatatcatagcatgggcggcctgaaagaaatatcagttaacagaagtagcataacggaacagaaaataaaaatgactatgctgatacaatgaactaggacaacccattcccattagaatataaatacttttagaaacactattcattcaagtcaaattacatatttgcccacattctcttgttatttatcaagctaaa

SEQ ID NO: 16800 - DNA, 444 bp, Glycine max
tgcatgcatctgcatcccttaaaatcatgttaactgcatagattttctacatctaatatccagtcgtgtcgatttgggatgactgaccctctcgatgagtcgatctcttgctttctcataagggtgaacccttgggtactagtaccctcacctccagaggactacatgtcctcgccttcagagggccacacgccctcgccttcaaaggacttcacgtcctcaccttcagaggactacacgtcctcgccttcaaagggtcatgtacctttaacttcagaggactacacgtcctcgccatcaaagggtcatgtaccttcacctttgtagggcaacacgccctcaccttcagaggactacacgtcctcgcctttagagggccgcacaccctcgccttcagaggactacacgtcctcaccttcagaggactacacgtcctcgccttca

SEQ ID NO: 16801 - DNA, 439 bp, Glycine max
tctcttttcttgtttaatgattatattttgcttctaatccttgtatttgggtatgttcttatgacatttgaatacttagtatttcttttattattcgattagtatgattgaacatgatgattatatttacttgctcttggttgtttatggttatgagttttaaactcaattattttgatgatatatgattagtggtatgtacttttatttggctattatgaatgactttctggattatatgacattctatgaagtattatatttctagtgtgatgaatggttatgtttgattgttttctattctcgtgtatttggctatattattatggtatttgaacaatttactatttccttatttgcatggtatggttgaacaagtatgttatttgattatatggatttcatagttaataataaactaaaattcacgtagaattac

SEQ ID NO: 16802 - DNA, 391 bp, Glycine max
agcttgtgagcttaagttaaaaaaaagatgttgaagaagttgacttgactatcaagtacaagaaaagcttttggtctagtgataagcacttgattccaagtgtttcaccaataaatgacaagagtttcataagtccaatttcatgatcaagtaaaaggcttacagttttcccatttgtggtaatgatggtgacatttttgccattgatttgtgtcacctctccatcaatccatgcatcctcaggatcctcaacccaaacctgtgatccaacgatgatgttcacaggtgttccctgaaccaatcacaacaaggcaagaaaaagtgttactgttaacacatgatctgacagcaaataagtgggaaggatccaacaacaaccaacatacaacac

SEQ ID NO: 16803 - DNA, 432 bp, Glycine max
tatcacataaatagcttcactaacattaattgtgattctattttattctttattacatattatataaattaatgtgtatttaaatggtaattaaatgtttttatcaattgtaattacatggagataaaggaagccatttcaaattaaaaaatttgaaatgatatgttttgtttttaatgagtaaacaattaatgaatttgattttcacatatcttctaattattactataaatagagaaccaattcatataacttattatcatttctttgtattcatctagtcgattttgacacattgacatatgatgacaagtgtaagatcatattctaaagaaaaaattacacaaaattgtacttatatgtcaatcctggatctataaggattttttatataatgaatttaatcttttattcttaattactataatcata

SEQ ID NO: 16804 - DNA, 305 bp, Glycine max
agcttgtacttgatcttggattaatgagctgaatcatagctaacattaactaatcataattagagaaactttcgctccaaaatttgcctccaaaaattcaatttcaaattcaagtgaaatttgaatacaaattcagatttccctccaattttgtgtgacacttacgctataaatagacgccatgcgcgcgcatatgttcgactgcgatcatttgaaaattacacttcaaatttctgaccttattttaagcactcattgcgcgtcgttctattctctgccttattcaacttcttccacatctaccc

SEQ ID NO: 16805 - DNA, 442 bp, Glycine max
aagctttagaattataacataagaactgtgattattgaagaatctatccatgttgtttttgatgaaattgaccctatatggccaagaaaggatacacttgatgatattgctgatacattagacgacatacacattgatgagaaagggcatagaggcaaaggaaatggtaatgaataagactgtcatattgatgaaaataaaaaaaataaatatagatcttccaacagagtggagaacttcaagatatcatgctcttgataatatcattggtgacatctcataaggggtaacaacttgacactctctcaaagatgcgtgcgataatatgactttggattccttaattgaacctaaaaatttatatgaagccataattaatgaacactggattattgctatgcaagatcagttatatcaatttgaaagaaataaagtctgggaa

SEQ ID NO: 16806 - DNA, 385 bp, Glycine max
agctttttattaattacactcatactgtaatcgattactagaggagattgtcagaaaatattctcaacagtcacatattttcagttggttcttgaatggccatcaaaggcctatatatatgtgacttgagacacgaatttgaaaaaaagagttttcataacaaaaaggtattatcttcttaaaaagcaaaatcattttatcctctttcaagagagatatcttcttctcttcttctttattaggaaaagggattaatagactgatggtctcttgttgccaagaaatctgaacacataggaagggttggccttgtgtggtggagatcttgtagcaggctgtcacaatatagtggaactctcaatcaagttgtttggggactggacgt

SEQ ID NO: 16807 - DNA, 384 bp, Glycine max
agcttattcacatgaaacacaaggcatatttatgtctctggtgagcctaagctcttcgctctagaggacacgaagctgtgcaaggaaagcagcacatagatccaagaaaagaaactgtggaccctgcaccctttgaagatcaagcagatacttttcttcccgggttttgtaaagctgttgatgtgactgtaagaattagagaatattctggaaaagaattataactacccaataataacagaagaattagtttattgagacaatctgtcttataattggttataacactgtaaagaaacagcaatgatttacacgtgtatactgtctagtattataaacatggagggagggaagcaaaataatcagaagactatttagttatta

SEQ ID NO: 16808 - DNA, 402 bp, Glycine max
ccttctcagcccacgcattcatagtatattgatcattaatattcacacaaataacagaatctatccccttagccttaaacttatcaatattctccttgtaaggaggaacatgtttgtttgaacaaactcctgtgtatgcaccctgagagaaagccaaagcaaaaaatacattactatggaataagtctataacaaaaaaaaagtaacacatttctttcaaacaattccatttcctataccataagaagcattcattcaaccacataaaatagtaccaaattttacaaaacaagaccaacaaacaccaaagagacaccccaaaacatatcaacatatcaaaaaaaattgcaagttaaacttactgggagcccaaagatgacaactttcttgtcctgaaacatg

SEQ ID NO: 16809 - DNA, 367 bp, Glycine max
  unsure at all n locations
agctttatctntgtccccaaggcttcatgtagacttgtccaaaatcgcgaagtgaacctcggatccctgtcagatacaatactagaaggcattccatgcaaccttaccacttccttgatgtacaactccacgagtttctccattctatacttcatattcaccggaataaaatgagcagatttggtgagtcgatcagctatgacccacacagcatcatgcccacgactagtcttgggcaaactagatacaaaatccatagatatgctctcccatttccattcccgaatttacaatggcttcaattctcctgatggtcgctggtgctcaaccttagccttttgacatgtcaaacatcttgctacatatt

SEQ ID NO: 16810 - DNA, 394 bp, Glycine max
tcttacatagtccgtctttgcttgaccttctttatgcttaaaaacagaaacattaggcatatgcaaaagatcaagaggagttagtgggttaaaaccataaacaacttcgaaaggagaacaattagtggtgctatgaacaactctattgtaagcaaatgcaacatggggtaaacaagcttcccaagtttttaagttcttcctcaaaactgtcctaagcaaagttcccaaagtcctattaacaacttccgtttgcccatcggtttgtgggtgacaagtggttgaaaataacaatttagtgcccaacttgctccacaaagtcctccaaaaatggcttatgaacttagagtccctatcactaacaatgctccttggcaaaccatggagtctcacaatc

SEQ ID NO: 16811 - DNA, 399 bp, Glycine max
agcttgtttgacagccaatttgaggggaactgagcggttttgacgcttcattaaaaattgtcgaactgaaccacctttggcatactcagatacaatgcaccataccattggcttgcggcatgcaccaatgaaacgaactatgttagaatgctttagtgtggccaacattgtgacctcctgctggaactgttgttccatcaattgagcctttgctggatcattttcaggcctctccaagattttgattgcaacatcttcaccattgtaagtacctcggtaaagtttcccaaaagctccttgagcaaaaggctcacccatattcagtttcctgatatcaattgtccactcatcaaaattgtcaagcccttcagtcggagaactattgtccattatagcttg

SEQ ID NO: 16812 - DNA, 449 bp, Glycine max
tcaagcttggtatattgatgctgatggtgtagttcagttgaaagtactagcagcctgtttgattgacacaggcgatgaactccttgtcactgaattaatgtttaatggtgaatcaatatttgtttcccaattatagtttacatttcattatgttttgtaacctgtttttttcccttcatttcccctccaccattaggtacttttaatgaccttgaccatcatcaagttgctgcccttgcgagttgtttcataccaggagataagtcaactgagcatatacaactgagaacagagcttgcaaggcctctgctacagcttcaagatagtgcaagaaggatagctgaggtaggtgtttgttcacttaacctgaatgtatcttctgaattaaactataaatggtatcacccttttgtcacagatacaacatgaatgcaaattggatataaatg

SEQ ID NO: 16813 - DNA, 449 bp, Glycine max
  unsure at all n locations
ctcaagcttgaaggtgtatagcccaccatctttntatactggtaatgtgtctactatcattatcatcattttttctccgtcattgaggtgccacttgaactgctaggtctctccacctttgggcgtattcttttgaaagattcgtgccccctttttgcacatgttctgtagttgcatcctatcctaagacatcatattgacactgcttaacgaaggcaaccactangnccttccaagaatggactcgggaaggttccaagttagtgtaccaggtaacagctaccccagtaagactttcttggaaggaatgtatcagcaattcctcatcttttgcgtatgcccccatctttcgacaatacatctttagatggttcttgtggcaagtagtccccttgtactcgtcaaagtctagcaccttgaacttgggaggggtgatgatattgggtact

SEQ ID NO: 16814 - DNA, 428 bp, Glycine max
ctcctacaatagaggaaacacaaaatgaatttgaagagaattcaaattgcacctctgatggaattcaagtttccataggtgaggaaaaaacacccaattgcacgatatgtgaaaatgaagtggatggcggaaaaataaaaatatgtggccatcggttttgctccaataaatactaccatgttaggtgtctaacaattaatcagttgaagtcatatggtcattgttggtactgcccttcttgtttatgccgggttagcttaactgatcaagatgatgatcggattgttctgtgtgatggctgtgatcatgcatatcacatatattgcatgagacctccgcggacttctattccaagatggaactggttctgcagataatgtgatgctggaatacaagcaatccaccaggctaaacacgcatatgagttc

SEQ ID NO: 16815 - DNA, 418 bp, Glycine max
tgaatcggacatccgtgtgaaaagttatgaccatttgaatttctcaagagcttccgttgttcaatttcgatcctctcgacatattatgcacccgaatcggacatctgtgtgaaaagtcatgatcatttgaatttctcgagagtttccgatgtttaatttcgagcgtatcgatatattataaccctgaatcggacctcagtctgaaaagttatgaccatttgaatttgacgagagcttccgttgttcaatttcgaatatcactgtatgtgatgcgcctaaattggacattcgagttaaatgttatgaccatttgaatttctcaagagcttccgttgttcaattctgagcgtctcgatatgtgattcgcctgaatcggacatccgtgtgaaaagttatgaccatttgaatttctcaagag

SEQ ID NO: 16816 - DNA, 441 bp, Glycine max
  unsure at all n locations
ntgtgcgatgtctatccatcattaagcggaaaaatcaggaaaaaatggtgatttacacccgattgagactacctcattcataagcacttgtaagagaagaaaataagaaagtaaaatgagtaaaaatcctcccataagttagatgagacaacttttataagagttaagtacataagttgatccaaacagggttttaggggaacttcaaataggctcaacaaaactaaatgcaacagctcacaaaaagcaccaatgtagagataataatggaagcgcatctcaccagaacatgtagagataataatgtacaatgcacaaacaacaccaagaaacctgcaattaaaaaccatcaaaacccaattgattctaaagaaatcggataaaagttagaccatcaataaaattttaaaaaagggaagcaaaagtcaaaacttttccatt

SEQ ID NO: 16817 - DNA, 400 bp, Glycine max
agcttatgctgcaaatatttacaatagacctcctcaacctcagcagcaaaatcaaccacagcagaacaattatgacctttccagcaacagatacaaccctggatggaggaatcaccctaacctcagatggtctagccctcagcaacaacagcagcctgctccttccttccaaaatgctgctggcccaagcagaccatacattcctccaccaatccaacaacagcaacaaccccagaaacaaccaacagttgaggcccctccacaaccttccctcgaagaacttgtgaggcaaatgactatgcagaacatgcagtttcagcaagagaccagagcctccattcagagcttaaccaatcagatgggacaattggctacccaattgaatcaacaacagtcccag

SEQ ID NO: 16818 - DNA, 435 bp, Glycine max
tctggaaaattgaagttcgtttttataaccttttcatgtgaactttcaaacatattattgagctcatttacactaatttaatgtagttcaaaatttaaacacatgatttgagattttagaaatgatattaattcgtatttagtaatgaatatcatgtttcgtaactatattagctcttatatttcatatttatattttctattattcctttgaaacaatttatacttcaatgttgttctgagactcctcaaatctatttgtgctgcaatagttcaactatttcatttgaactggattggtgtagttggtatgaaattggtttacctgaattcgttacaaataaagtagaaaatttatatataaattgttggatggattttgttggacaattgtgctataagtagtacatatacatgatcaaacaaaacatgataa

SEQ ID NO: 16819 - DNA, 422 bp, Glycine max
tgtactcgaagccctctttttaaggctgaggctccacaccgccagcggatactagctgctgagtctgctatcttcaatcgactttttgtggagcgggcatacaagtatcgccctgttaaggtggtggaatttgaacttccgcggcagcagtgtgtggtttacttggatctgaagcgggaggagtgcaccaatttgttcccatctggccgagtatattcacaggcattccatttaggtggacaagggtttttcttatcagcacattgcaacatggaccaacagagctctttccattgctttggcctgtttttaggaatgcaggaaaagggctcagttagctttgccgttgactatgagtttgctgctaggtcaaggccaacagaggaatttgttagcaagtacacatgcaattatgtattcac

SEQ ID NO: 16820 - DNA, 389 bp, Glycine max
tagcttatgctttgaaaaaagtctaagtgagtctaccttgtatgtcaagaagagggatgttggaatagtcattgtttccttgtatgttgatgacttacttatgacaagaagttcaaaggagctgattgaagagttaaaaggaggaaagaaagaagcctttgaaatgactgatcttggaaaaatgttctttttccttggtatgcaggtgcaacaagatagaggtgaagtctttgtaagtcaagaaaaatatgcaaaggaaattcttagaaagttcaagatggaggaatgcaagccaattgcaacgccaatgaatcataaggagaaattcagcaatgaagatggagctgataacgttgatgaaaaactgtacaaaagcttaatatgatgtc

SEQ ID NO: 16821 - DNA, 411 bp, Glycine max
tcttagtttcaatgatgcagatgagtttgtggctacttcatgcactcctctaatgactatggcatcatttctggctctaaactgttgagagttggaaaccatattctcaactaaatttctggcttcagcaggggtcatgtctccaagggctccaccactggcagcatctatcatacttctctccatgttactgagtccttcataaaaatattcgagaagaagctgcttagaaatctagtggtgagggcaactggcgcatagttttttaaatctctcccagtattcatataggctctctccactaagatgcctaatgcctaaaatatcctttctaatggtcgtggtcctggaagtatggaaaatttttttctaagaatactctcttgaggtcatcccagctcgtgatggacc

SEQ ID NO: 16822 - DNA, 376 bp, Glycine max
  unsure at all n locations
agctttaaggtcaagagggctgaaggatgatacaacttgcctcgttgtagatattattccttcagatcatcccgtgttgccaacaattccaagaaagaaacgtaacgtgctaacttcccttctctttggaaagaaatctcaaaactctacaaacaaaggcaccaataagctttcttctgttggtgttgtggaggaattatttgaagagggttctgcaatgcttacagagaggtaactgggaccataactgctaaatttatatttgcatgatgtcatttgaagtttaattggtcaccatcatggtggaaagagagaaaaaatgantcctttttcccaatacatctatctttgattctntaaatttcggacttaaaat

SEQ ID NO: 16823 - DNA, 455 bp, Glycine max
  unsure at all n locations
gtaggcctaggatcttcttcatcaatggattcctttgcttcttggaagatgtatggcagcgtaatggagaaggaagagagagaggagacgccacttcaaggagaagatgagtctagaagaagctcaccaccataggaggccatgaataagagcttggaggaagaagaagatgaatgaagggagaggaagagaagagcacgaaattttgtgctctaaaagagctataaaatctgaagtttaattttcaaatgatcaaagttgaaaaaatgcacacacatggtctctatttatagcctaagtgtcacacaaaattggatggaaatttgaatttctattcatatttcacttgaatttgaaattaaatntgtggagccaaaatttcactaattatgattagtgaattttagctatggttcagcccactaatccaagatcaagtccaagaatctccacta

SEQ ID NO: 16824 - DNA, 402 bp, Glycine max
  unsure at all n locations
catgttgncttggttttaaatttcgagcgtctcgatatatgacgggacttaatcggacttccgagtaaaatgttattgtcgctcgactttgctacgagcttcggttttaaaattcgagcgtcacgatatattacgggactcaatcagacttccgagtgaaatgttattgtcgttcgaatttgctacgagcttcggttttaaaattcgagcgtctcgatatattacgggactcaataggacttcccagtgaaatggtattgtcgttcgactttgctacgagcttcggttntaaaattcgagcgtcacgatatattacgggactcaatcagacttccgagtgaaatgttattggccgtcgaatttgctacgagcttcggtttaaaattcgagcgtctcgatata

SEQ ID NO: 16825 - DNA, 365 bp, Glycine max
atatatcgacgtgctcgaaattcaaaccgaagctcctaagcaattcgaacgaccataactttgactctgaagtccgattgagtccccgcatatatcgagacgctcgaaatttaataccgaagctcggcgaaaattaaaagacaataactttgtactcggatgtccgattgagtgccgtaacatatcgagacgctcgaaatttaaaactgaagctcgagaaaattcgaacgacaataacttttcactcggaagtcagaatgagtcccgtaatatatcgaacgctccaaatttaaaaccgatgctcgcggaaattcttacacaataacttttcactcgaagtgcgattgagtcccgcaatatatcga

SEQ ID NO: 16826 - DNA, 386 bp, Glycine max
cgacactatgaaactcagctttgacgatatgttagaactgcttttgttgttacactccaactggtggagaagcatgccagaaataccgaagtatttatatgcgtcctcagggtctatatatcagtttgaaggagaagtaagcttttttcatggcactgctctttatgttttttctcttggctttgagaaaatactaagtatttgaattcttcagaggcaagatccttgaagtactgaaaaactggccagaaaagagtattcaagttattgttgcgactgatggtgagcgtatattaggacttggagatcttggttgccaagtaaaatatagtgttagtctcctatatctgcattacacacagagacattagagtaacataattttt

SEQ ID NO: 16827 - DNA, 404 bp, Glycine max
  unsure at all n locations
agcttgtgagctnatgntaaaaaaaagatgttgaagaagttgacttgactatcaagtacaagaaaagcttttggtctagtgataagcacttgattccaagtgtttcaccaataaatgacaagagtttcataagtccaatttcatgatcaagtaaaaggcttacagttttcccatttgtggtaatgatggtgacatttttgccattgatttgtgtcacctctccatcaatccatgcatcctcaggatcctcaacccaaacctgtgatccaacgatgatgttcacaggtgttccctgaaccaatcacaacaaggcaagaaaaagtgttactgttaacacatgatctgacagcaaaaatgtgggaaggatccaacaacaaccaacaaacagcgcagagaagactcct

SEQ ID NO: 16828 - DNA, 401 bp, Glycine max
agcttgcatcatatgctatcgacaataacatttcactcggaagtccgattgagtcccgtaatatatcgagacactcgaaatttaaaaccgaagctcgctgcagacgctaacgacaataacatttcactcggaagtccgattgagtcccgtaatatatcgagacgctcgaaatttaaaaccgaagctcgtagcaaattctaacgacaataacatttcactcggaagtccgattgagtcccgtaatatatcgagacgctcagaatttaaaaccgaagctcgcagcaaatgctaacgacaataacatttcactcggaagttcgatggagtcccgtaatatatcgagacgctcgaaattaaaaccgaagctcgcagcacatgctaacgacaataacatttcactc

SEQ ID NO: 16829 - DNA, 415 bp, Glycine max
  unsure at all n locations
gagcgtctcgatatgttacgggacttcttcggacttccgagtgaattgttattgtcattcgaatttgctacgagcttcggttttaaatttcgagcgtctcgatttattaggactcaatcggacttccgagtgaaaagttattggcgntcgaatttgctacgatcttcggtttgaaatttcgagcgtctcattatgttacgggacttaatcggacttccgagtgaaaagttattgtcgtttgaaattgctacgatcttcgattttaaatttcgagggtctcaatatgttacgggactcaatcggacttccgagtgacaagttattgtcgttcgaatttgctaccagcttctattntaaatttcgagcgtctcgatatattacgcgactcactcggaatttcgagtgaaaagttatt

SEQ ID NO: 16830 - DNA, 421 bp, Glycine max
  unsure at all n locations
agcttcattgtgatctttttctattgtagaaattgatcactcccactaatcaagtcattctcaagaaattntgcgtttcttgattcgacaaccctagtgctatgtgatggacaatagaatctataccctttggactttntagcatatccaatgaaatacccactaatagtccttgggtctagtttcttctcttgtggattataaactctcacttcagatgggaatccccaagcgcatatatgtcgcanactcggtttccaacctttgaataactagaaaggtgtctttaagacagccttggttggaacccggtttaatatatatacaaccgtctttaatgcttcaatccacaagaattgaggaagttntttattacttctcatactttntatcatgtccattaaagttcggtttcttcttt

SEQ ID NO: 16831 - DNA, 397 bp, Glycine max
tgagaaccataggccggtgtctatgggtcctttgatattatgaacaatccactttgcatccttgagaggagtactcattacagtctccatgtatcaactgatgactccagcagcatataaaacgtctagtcttgtgcacatcatatcgtaaactacccaccaaactcttgaactttgtatcatccacctttcctgcttgatcgaactttgataacttatttctgcactcaatcggtgatccaattggcttgcaagcatccatcttgaatctattgagcatctggtgtgtgacatagccctttcacacttacgagatggcaaagtggctctgtgagtgggcgatgacgatggtgagagctcttgctgaacatgttgaggtgtcttatcttcttcaagt

SEQ ID NO: 16832 - DNA, 433 bp, Glycine max
  unsure at all n locations
tctagcgtacccgctatnggtgctcataanatcccaaattcaaatccctcttattactagctattttgaattctttagttcctgaatgtacaaccttcaaattgttactcgttcccgtatttgttttctgcaaaaaagaaaattaatctgaaacaattcaggctgaattgttatcgttattattactcgaaccataaggaataacagctaaacaagtaatttaaaatgtaacttttaaattatgtggtatttttttaattacaattttacttcaatatctaattttgttaatctacttaggtcgttgtttaaatataaatatgaatttaaaggtgatctactgataatataaagtacttgctaatcacaaattatgatacctatcattntcaattntaacttaattntataaatattaataaatgtataataa

SEQ ID NO: 16833 - DNA, 434 bp, Glycine max
  unsure at all n locations
ntgtacggccttaagcaggcccccaaacaatggtttgaattactgcaatctactatcttcaagccctttgtgatgcaaactgggcatcaaatgttgatcactgaaggtgaatttcaagttttgccatatatttgggcccttatcatatatcttggtggacctgcaagatcaagtgcaaaggcaaaatatcgtagtttggcataaactactatagaattatcctggattgagaccatgtttaatgagttgtaagtttccttcaacacactcattgtattatgtgacaaccaaagtgttgttgctcttgcccactaaagttagttattgacaactgttgacacctaactcaatagattggtaacacaaaaattagtaccctaagaataaaagaatattntaatntggtatttgttcaatgaaagagtaaaatatag

SEQ ID NO: 16834 - DNA, 401 bp, Glycine max
agttttatatttcaatttcgagcgtctcaatagattacgggactcaatcagacatccgagcaaaacattattgtcgtttgaattagctcagagcttcagaattcaatttcgatcgtctcgatatattacgggtctcaatcagacatctgagtaaaaaagttattatcgttcgaatttgctgagagcttcaacattcaatttcgagcgtctcgatgttttatgggacttaatcagacatccgagtaaaaagttattgccgtttgaatatgctgagagcttcaacattcaatttcgagcatctcgatatattacgggactcaatcagacatccgagtaaaaagttatcgtcgtttgaatttggtcagagcttcaacattcaatttggagcgtatacatatatt

SEQ ID NO: 16835 - DNA, 379 bp, Glycine max
tctggaaggagatcaacttgatgttctatgcctcttgattgtggtagtccatgaggaatctccataggaaagacatttctaaattcctgcaataagggttgaacactaggagaaatagaaatagtaaactcattagaattatgagtagaaattttactgtctttgcaatactgtagattgagtggttcatgagcaggtaacattttcctcacttcactcgcctctgcaaaataattaaattttctctcatgtgtatcactcttttcctcgggtgtatcactctttttcatattccttttgggtgcctcactattatctttctcttggtctctcttttctctcattctgatttggtcatcacacacttctctaggggata

SEQ ID NO: 16836 - DNA, 417 bp, Glycine max
  unsure at all n locations
agcttgtattcattacttgttgagaaccataagccaaagtcgattgttcctttgatattatgaagaattcattttgcatccttgagatgagtagtcattagagtctccatgtatcaactgatgagtccagtagcatatagaatgtctagtcttgtgcacatcanatcgtaaactacccaccaaactcttgaactttgtagcatccacctttcctgcttcgtcgaactttgataacttaattntgcactcaatcggtgttccaattggcttgcaagtatccatcttgaatttattgagcatctggtgtgtgacatagccctttcacacttaggagatggcaaagtgtctttgtgagtggttgatgttgatggngtgagctcttgctgaacatgttgaggtgtcttatcttcttcaagt

SEQ ID NO: 16837 - DNA, 443 bp, Glycine max
  unsure at all n locations
ntagtgcatgtaatccacttatgaatagaccccatcttcctcataatataaaactagaaatcccacaaacataatcgtataccttctcaaagttaactttaagcacaaggcatgatttcttccttctcttagcatcatcaaccacctcatttgcaatggctacactatctaacatattttgctctcccataaaggcaatttgcttttcaccaataattntagggagaaccactcttagtcttcttgctaaaaccttagacaaaattttatacaagcacccgattaaggatataggcctaaagttattaaggccttgtggatcatccttttttgagatgagaatgataaacgaaggattntctcttcttggaattgctccattttcccaaaactcttgcaacatatttataaaatccaccttcaatgtagcccaacatttcttg

SEQ ID NO: 16838 - DNA, 453 bp, Glycine max
  unsure at all n locations
tatcattctatctctcanaaagtatgaaaggaagttcaagtgatgcaggtaattcatacccctagtagacaaatatttctatcttaccttcatgtagacatctgtatctggatcaggtgtaatatttgcttctttttctcttctgaacacctctgctagcaaatctgcagaatgtgaaataattttagttaaaacttgatttttcatatgaattttggctcgatttccaaattgcagctctgtgggctaaccataaggaggcccaactccttggactcatgctgagaaggccagggtttctctgactgtcatttctccaatatgaagatcattttgacttacaaactcattcatcccatgaccattataagtcacctttccagtgaactgatcaagaagccaaacctaattagctacaaatccaataatggaaaatatgagcacaaacatcat

SEQ ID NO: 16839 - DNA, 398 bp, Glycine max
  unsure at all n locations
agcttcttactagtttacggctttctggatgtagatgatgatatctatacagatggatcttatatatctatatatctatagatagatatatagatatagatatatagatatagatcatacaatgaagtaccgcacgagtgggtatataggaatccaaatctgccgaatcactcatgttatgatcttctacatcctaggtcttcccgttccttcatctggcttatgttcttcatgtagcattcagactgaatgactctatgaaattacgtcgctacttccacatggtacgggtaacgtatgagacatctctatttttcccggngggaatccttagaattaccacagcttagctntcaattcgcctctgaccatcatatgaaatgtgaataacccgtcct

SEQ ID NO: 16840 - DNA, 461 bp, Glycine max
tcaagcttgtgaatttagttttgatgcagcaagtgagggaaaacaattcttaattgatgtctcaaaaaaaaaagcagcggattcagtagcacgggctgcaataagagctcggtgtcattatgttaataaaaagtggctcggcggtatgttaacgaatcggtatactacagaaacacgacttcaaaagttcagggacttgagaatgcaacaaaagacggggagactcaatagtttttcaaaaagagatgccgctatattgaagagacatttagctcatttggaaacatatcttggcggcattaaatatatgacggggttacctgatattgaataatcgtcgatcaacaagaagaatatacggctcttcgagaatgtataactttggaaattccaacaattcgttcaatcgatacaaattgtgacccggacctcgccgatatttcaattccagctaatgatga

SEQ ID NO: 16841 - DNA, 410 bp, Glycine max
  unsure at all n locations
agcttgctttcattttcagtcatcaaagtcacctcccctatgccaacaatcttgcttgtgacatggttgcccatcttcaccataccaaaatcctctttttgatatggcaaaaaaaatccttcatgaggagtaacaaggaaaaatactccagagtcaattatccatatacaataatcagatgcaatattaaaataattttcattaccgataaaaaaaacattctcatcatttaatgacagagaagtagtggttccacctttattcttcttctttgggtcaattcaattagcatggatagttccagtcttctgatctttcttcaagaatctaccctcaaacttcttatgggccgactttccgcaatagtagcaactaaagcctttgnggtgagacttggatctttcttgtga

SEQ ID NO: 16842 - DNA, 425 bp, Glycine max
  unsure at all n locations
tgcttctacaactctatttataatatttgctgcaatctttatttcctttcccaagagtgactatagtaagttagaatgacaaatcatgcttcttaccatatccttaagagttttgtttcatctttcagctactacatccatgctaggtgaccacgacatggtgtactatgggacgatttcacattcctctaggtacctagcaaaaggccccggacgttgttcacttgaaccgtcatatctgccatagtattcaccaccacggtcatatctaacactcttgattcttttgttgagttgattttcaacttcaactntaaatgttttgaacacatccagagattgttatatttcatgtataagaaacaagtatgcatatctggagtaattgtctatgaatgatataaaatattgttgaccattccatg

SEQ ID NO: 16843 - DNA, 424 bp, Glycine max
  unsure at all n locations
aactgatgcattggtaacttggaacccttttgccttgaatctgaaatctgtcctggcgcagggtttgggtttgtgctcctctgctgaccaccatacagaccttngcccttccatgcagcaacctatagcaattgagcagcctgaagcttatgctgcaaatatttacaatagacctcctcaacctcagtagcaaaatcaaccacagcagaacaattatgacctctccagcaacagatacaaccctggatggaggaatcaccctaatctcagatggtccagccctcagcaacatcaacagcagcctgctccttccttccaaaatgctgctggcccaagcagaccatacattcctccaccaatccaacaacagcaacaaccccagaaacagccaacagttgaggcccctgcacaaccttccctcgaa

SEQ ID NO: 16844 - DNA, 438 bp, Glycine max
tgaaggcaaactggatgcgttggtcaacttggtaacccatctggccttgaatcagaaatctgtacctgtcgcaagggtttgtggtttgtgctcctctgctgaccaccatacagacctttgcccttccatgcagcaacctggagcaattgaccagcctgaagcttatgctgcaaatatttacaatagacctcctcaacctcagcagcaaaatcaaccacagcagagcaattatgacctttccagcaacagatacaaccctggatggaggaatcaccctaacctcagatggtccagccctcagcaacaacaacaacagcctgctccttccttccaaaatgctgctggcccaagtagaccatacattcctccaccaatccaacaacaacaacaaccccagaaacaaccaacagttgaggcccctccacaaccttccctcga

SEQ ID NO: 16845 - DNA, 393 bp, Glycine max
  unsure at all n locations
agcttgaggagtctgcttcaacccatagaaatccttgagtaacttgtgttgggaagtccaatattgcctgccataattcatgtggtgcaacttataaaattgttggacaacttcacttaatgttatttgattttaagatgaaatctaacatggtataaagccttacaacccatctttgtgtattgcctatttttctacattggtggagtggggatgttgaaaagtcgcacatcgtttgccttaattctgagggtgcaacttatatacttattgggaaactttacttaagactaatcgatgttatgaatcttatgatgaaacctaacaacttgcaacgaagagacttgtcggttgctacttgtttcaaagcttgggtattngtgcatacaaacc

SEQ ID NO: 16846 - DNA, 413 bp, Glycine max
agtgggagttgttggaggaagttcagatgaaccagttgtagaagattttgatctagataatttaattttggtggaacttggtgatgatgcacaatttgaggaacaccttgatgatgatggagacggtgatgaaactgatgatatccatgaaaatgatcctattagagaattagacatggttcttgacgtagctcctatgtggagcttgtaggccttggatattcttcatcaatggagtcctttgcttcttgaagatgaatgacagcagaatggagaaggaagatgattggagatgccacttcaaggagaagatgaatcaagaagaagctcaccaccataggaagccatggataagagcttgaaggttggagaaaatgagtggagggagagggagagaaagagcatgaaatttt

SEQ ID NO: 16847 - DNA, 410 bp, Glycine max
agcttattcttcaaacctattgaaacgatagatcctgaagaaaatggggggaggggggttagcattagagaatagaataacagaattactttgatttaaatcctggcaaccagaagatagcattacctgccaaattggcaattcctatgcagacatttgcaatgtctgatggcactccagcacttttaaaaacagttgaagagaaataaaacacagcatttataccagatagctgttgtaaagcaaatagggttgatccaataaaaacaactgcaaaacgaacttgtgaataaaatataacttttggaaacctaaggaaaccagtgaccagataacaacaatggcaaatacactcacaagtcacaactattccagagacaaaccaggataaatgcatacctttagaatga

SEQ ID NO: 16848 - DNA, 412 bp, Glycine max
  unsure at all n locations
agcttgtattcgattacacacatactgtaatcgattaccagaggagattttcagaaaatattctcagcagtcacatcttttcatttggttcttgaatggccatcaaaggcctatatatatgtgacttgagagaccttgttatcatgtgggcctttcataccgggcgtcaacttgactgggcacacttagtcggatattgcatgcataaggcattgcgattaaatggtccattgccatatccacaccttgtcactctctttcttcgccattttcaaattcttcttcattctgaaccttatgttccaatcaagagatccttttttaattggtgctgctgtgattgcctcctttggttaccgcanagagcatgatggctcttgngtcanaatgggtgctcaacccgctgatgatg

SEQ ID NO: 16849 - DNA, 335 bp, Glycine max
actagagagaattccatgctaccttactactaccttgatgtacaacatcactagcttttccattgtatacttcatattcactgcgataaaatgagcagatttggtgagtccatctactatgacccacacagtatcatgcccactactagtcttgggtaaactagatacaaaatccatagatatgctctcccatttgcattccggaatcttcaatggctgcaattctcacgatgggcgctggagctaacctaagcctttgacatgtcaacatcttgctattattcggcacatcttattcatgcctgccaccaaaactttcttaatcttggacatat

SEQ ID NO: 16850 - DNA, 346 bp, Glycine max
agcttggtttgcatcaaccttggccattctaaaatcttcctttaccttatcagtgccctctttaatgtatgcagctggttcagtaatatttgaatccatgccattgatgtttaccccaacatggtttccttcagtgtctgagtcatctttgtaaccattcattgtgtcaaactcaactgcaaagatgtggtttgactcattcccatcattggtggagttaacaaggccaagataatggccagcctcaaccccaggaaactgtgttgagggtgctatggtgaaggcaaggccaaagccaccagaaccagaacttgtggacacaattgagaaaacaaaattggtgctg

SEQ ID NO: 16851 - DNA, 414 bp, Glycine max
  unsure at all n locations
cacatactgtaatcgattaccagagatgnttttcagattatattctcaatattcacatctttgtacttgattcttgaatggctgtcaaaggcctatatatgtgtgacttgngacacgaatttgctaagagttcttcacaacaaaaaggtcttatcctcttaaaaagcaaatcatattatcctcttacaaattccttggccaaattacttgtgattcaataaggaattatttgagtgctcaaattgttcaatcaatctctttaaagagagatttcttcttttcttcttcttcattctgaanagggattaagagaccgagggtctcttgttgtgaaagaattctaaacacaaaggaagggttgtccttgtgtgcttagaacttgtaaaaggaatttacaagatagtggaactctca

SEQ ID NO: 16852 - DNA, 391 bp, Glycine max
  unsure at all n locations
agcttccttatgaatanttctaaagaagttagagcttagctacacacacatctctaatagctaagctcacctccttgagatgagaagctagagcttagctacacaccccctataatagctaagctcacccccatgacaaaaaaaagatgaaaatacaaaagaaaagtccttactacagagactactcaaaatgccccgaaatacaaggctaaaaccctatactactagaatggccaatatacaaggcccaaacgaaggataaacctattctaatatttacaaagataagcgggctcatacttagcccattggctcanaatataccctaaggctcatgagaaccctagggccttcccttggatctctagcccaatctacttggagtcttcta

SEQ ID NO: 16853 - DNA, 421 bp, Glycine max
aagtctcacattgtcatgtgctctgcattattgtagcctggttatacagaatcttgtctacaaagtctggttagcgataactcgcctgtgctttttcttccatgctatatgtagcaaagtcattgatccagtcaagcttgatgagttggaaaatgaggccgcaaatatactgtgccagttggagatgtattttccccccgctttctttgacatcatgattcacttgattgtgcatctggtcagagaaatcaaatgttgaggtcctggttatctactgtggatgtacccggttgagcgatacatgaagatcttaaaagggtatacgaagaatctatatcgttcagaagcatctattgttgagaggtacattgcagaataagccattgaattttgttcagaatacttagagaaagctaaacct

SEQ ID NO: 16854 - DNA, 419 bp, Glycine max
  unsure at all n locations
agctttgcttttgtttcatctatgttcactgcttttatgaggttgtatgcatattttttattctttgatggtaataagttaatcgtatatagtatgtgtctgttttggacttttggttagtaatgaattttttttggagctgagttagtggttgtttctttgaggtttgaacctgtgatctttagtaaattaatcaagcttgtcaccactaaaccaatcctagtggcttgaagtagtggttatgtagttggcgataatgtacaatcctttaaatagtttatctttctgtcatgcagtcgtgagtttacccatcgtgtgaagtctgtatctatggcaatgttcacgtcacaagaagttgatgctcttcaaaatgggggtaaccaggtacaatggtggattatctnttctatatttggaat

SEQ ID NO: 16855 - DNA, 428 bp, Glycine max
  unsure at all n locations
agcttctattctntatacaagaatgaagctctgataccagttgttagacaagtggcctcagatatcttaagaaggggggttgaattaagatattgcaaactatttccccaattaaaaattctatttcaatttcaatgcaagttgcaagttcccttaaaaatgaacttttaaataatgattcaaatagaacaatctgaatataaatataaatcaataataaataaacaagtttaagggaagaaaaagtgcaaactcagatttatactggttcggccacacccttgtgcctacgtccagtccccaagcaaccagcttgaaagttccactatcttgtaaaatccttttacaagttctgaacacacaaggacaatccttcctttgtgttcagatttcattacaacaagagaccctcggtctctcaatcccct

SEQ ID NO: 16856 - DNA, 442 bp, Glycine max
aagcttgaaggtaaactagatgccttggtattctggaacccatctggccatgaatcagaaatctgcacctgtcgccagactctgtgatttatgctcctctgccgaccaccacacagacctttgcccttctgtgcaacaatctgaagcaattgaacagcctgaagcttatgctgcatacatctacaatatacctcctcaaccacagcagcaaaatcagccacaatgaaacaattatgacctctccagcaacaggtacaatcccgggtggaggaatcatcccaaccttagatggtcgaatccttcacaacagtagcaacaagaaccttattttcaaaatgttgcttgtagaagcaaagcttcatgatgaatccagattgattcaaagatgttctgatgataacaaagatgaatgacaaaagctcaaggtcaatcaaagaatgag

SEQ ID NO: 16857 - DNA, 416 bp, Glycine max
  unsure at all n locations
agctttttattaaaatttcttccttctcctttgttttaatactacagtatatatgttattataatttgatgctgatttgtgtgcaggtaagttctcatggcctgagttggttggggtgcaaggaacggtagcggaggctacaattgagagggagaatccttcggtgaatgctattattgtgcctctaggatccgtggtcacaacggatcttcgaagtgacagggtttgggtttgggttaataaagatggaattgttaatagagttccaaaaattggataggaagtgtttacactanagcacatcaccatatatgttctaataagttatgaatatatagtaatatttaaataaggagttatttttccaattatgttctttgattgcaaaaaatattttatacttttaattatgctct

SEQ ID NO: 16858 - DNA, 405 bp, Glycine max
  unsure at all n locations
agcttgatatactttcaaaaggtgtagattgtgagtgcacttgacctcccacaaagcaaatgcaaagcacagcaatgtgggatcagtagccccatccttatagctaccatcatcaatcatgctctcccccaacaaagctgcaattatatataaaagcttcaacgtaagattgattttgacaatttctaagaactaaagacaaaaactgaattatgtgaacatgttaacccagacaaatcaataaacaggtggcacttacaactgaagatccttgatcttggagagcagggatttagttgctccctcaatgtgctttntaaacagcttcagtttctcttcgtcaagcttttgacaagaaactgcttcttgtcaaaagcaggttgctcctacctacaaagataatat

SEQ ID NO: 16859 - DNA, 451 bp, Glycine max
  unsure at all n locations
ctcttctcgtccttgtcctcttaagaatgaaacaagtttagtgttgcgattgaaaaatttttactcaatccatttctgttagtaatggaaaaagttgtgtacaatctatctatctgtttcacctttttttttacttgtatacatgtaaaattttaaatcacatcacttcaaatatgttaaattagctcattaaaaatataatttatttgtaagtaaagtccagattgattatttactcttttatccaaattttaatttgaaattcagttttaaatgaaaaaaaaggttattgtcactgactcattttataaaataattctcatccaaatttaaatttttaatttgtaaactttaatctttnttttatcagcctttanactttaatctgaatatatactatagtattttcttttcagcaagagataatatgtaggaataaatacgtcaatgt

SEQ ID NO: 16860 - DNA, 452 bp, Glycine max
  unsure at all n locations
tatatgatataaactcttatccttatgctttcacaagttatttttcaaaggctattggaatttattttatcatctattattcaatgtccaacacattattattaaacaaacatgaaattgtttggaaaaaccagtacttatgtagtgagtgtctttacacgtacaattaaaaaagacataactaagttacactaatgttttatattctgtttgttaacatccaaatcattttgcttgcatgtgaaagcatctccaagataaatatttgctgatgcaatcctccctaggaagggaccagtcactagagccatgagcaagaggctccaagaggattangctagagttgctgaagaatgccctaagattctcatgaacccagggtagatntctgagcccatgggccaaggttgagtccaattatctttgtacatattagactagaatgtcattat

SEQ ID NO: 16861 - DNA, 399 bp, Glycine max
agcttggtttttcttattcgatatttttaatttgcaaaattgaatgttattggagttgcactgtttatcatgcttgtcttgtacttaaaaatatttaacttctgcattttttttattccacagaacttttacatgataggaagggacaagagcaggacatattggaaagtactaaagattgaccgtcttgatccttccgagctaaatttgcgtgaagattccaccacatatacagaaagtgaatgttctgatcttttgagacggatacatgagggtaacaagtccacaggtggactaaaatctgctacaacttgttatggaattgtaggtatgtaaatccataatgtcttagctacctgcctgttgaccaattatgagttactgtctggatatactatt

SEQ ID NO: 16862 - DNA, 417 bp, Glycine max
agctttgctcgtatttgtcaagtgtatggaccacgttgtagccaaggtgctcatcgataatggttccagtttaaacgtgatgcccaagagcactttggagaaattacctttcaatgcttcccacctaaagccaagttccatggtgtttcgtgccttcaacgacacccgccgagaggttaggggagagattgacctccccgtacagataggccctcacacctgtcaagttaccttccaaataatgggcattaaccccccttacagctgcctgttggggcgcccgtggatccactcggtgggagttgttccctctacactccaccaaaagttgaaattcgtagtggaagggcatctggtcatcgtatcaggcgaggaagacatcttggtaagctgcccatcctctatgccttatgtgga

SEQ ID NO: 16863 - DNA, 433 bp, Glycine max
  unsure at all n locations
tatcacccgtatcagcgattgaagaaggttttaatgggtttcaggaaaatgagagtgcgtctaaaccattagctaggaaagaagtttatgatcaggttaaggacatcgtaactatctttgggaagacccaaaagaagccatcatctgagacaaacatacggaagaaaatgtcaatattcttttatcttccatattggtccgatcttgatgttagacattgtatagacatcatgcatgtggagaaaaatgtgtgtgatagtttaattgacactcttcttaacattaattgacactcttcttaacattatacgaatgttctcatttctcaggggatcattgcagcaatagtaaccacaaaaaaaaaactatgtttgctgataaaaaaatagaaatcaaacagcaattggtttgctttattntttcccatcaatca

SEQ ID NO: 16864 - DNA, 425 bp, Glycine max
tatagaatatataataaaagaaaaatgacaattgaagagtctatacatgtttcctttgatgagtctaatgccattcttccaaggaaggattttttagatgatatttcagattccttagaagatacacatattcatggaaatgactctaaagaaaaagacgaaggaagcaatgaggattctcaagataatggggctagaggaaataatgaacttccaagagaatggaaagcctcaagagatcatcccctcgacaacattattggtgatatatcaaaaggggtaacaactagacattctcttaaagaattatgcaataatatggcttttgtatctatgattgaacctacaaatataaaagaagccatagtagatgataactggataattgccatgcaagaagaactgatatcaattgaagaaataat

SEQ ID NO: 16865 - DNA, 446 bp, Glycine max
agcttgaatcttctaccctatttctgacagccagtgggtgagtccagtccaagtggttcctaagaagataggcctcacagtgatcaagaatgaaaaggatgagcttatccccacaagagtgcagaacagttggcgagtctgcattgattataggaggctgaattaggtaaccagaaaagatcattttcccttgcctttcattgatcaaatgcttgagcgcttggcaggtaagtctcattactgctttcttgatggtttttctggttatttacaaattcatattgctcttgaggatctagaaaagaccacattcacctgtccctttggcacttttgcctatatgaggatgccctttagcctatgcaatgcccctggtaccttccagcggtgtatgcttagcattttcagtgactttttagagagtcgcatagaggtggttatggatg

SEQ ID NO: 16866 - DNA, 352 bp, Glycine max
gctcattatgttattgttctttcaaagtatgaacaaacactatgattgttcatgatagagcattacagcatataatatattattacatttctgaaacgacatacaacttgtggtgttacgatgggtgcatagccaaggcgatcctttgcttttgagcaatcaaatgttctgctgcaagatatgagtcttattcttgaaggaatgagttgaggcagctccatcccatatgggcctagcaacttatatatgcactccaaccaatgtgcactgggcatgataacaaaagtggtggatctttacccttggcctataagcaacatgacttagattacaaagaaatggcattgacaat

SEQ ID NO: 16867 - DNA, 468 bp, Glycine max
  unsure at all n locations
ctataatactcagcttgagccaaagggaaaaagaacttagttattcaatgtactctccttaatanagtgtgttcaatgcaaagttaccactctattccatccaaccttgaggattgataaaaccattatgataagtcttcattaaaattgttcttgaatattgcttccatggtctttgaagataagtcctaaccgggttttgaaccggtctcacatctgaggcagctgtgactcaagaattgcgaattgaaattccagtgttttggtttggatcagttctgccttgtgcagcgatggtgttgactatgttgggagggtttcttgcaaggtgttgcaattctgtaacacaacaacaacaacatgctacaggagatttncatcaacttccctgccacacgcgtttgggtaacaacaaaatgataagtcaactaatagccaggagattacattacactttcacatgcacac

SEQ ID NO: 16868 - DNA, 438 bp, Glycine max
  unsure at all n locations
agcttcccgcctgtgtcaatggcggcacccacgttcaaaagtgaccccccccccccgtaatttgttttaaaataaaccctcttccgtaaatagttttcaaaagcatcccccttctgtaaatttgcctcggtgtgaagatagtctagtattcaagcatagatagcaccataatcattgctgagagaattctaaaaatctcggctaatattaaccaatttttatgtcaaacaaccaatctgacaattttcacaaatattaatcattttcattaatgttaaccaatattattggcaaatgaacaattgtgtgaaaaattaactggattctatacattattagatttatgatttttgttcttaaattaaaataaagactgttctcttaattatatattttttattcttatgattcanaataaataaataaaaacttaagaga

SEQ ID NO: 16869 - DNA, 311 bp, Glycine max
  unsure at all n locations
agctncgaatgtattattattctntaagcatgtctgtaacatggtttgtgcagtgctttgaaacttcagaatgggccatatgctntcgaagatatgataaagatgggtaggatgctggagaggagcttctttttcgagcccgaccctgcttnttcagtcgttaacatccaccacattaatggccacacaatactgatcatgagggtgacggcagctctttcagtgactgcatanangtatgtctattcttaaccatgtgtaagactaaatatcagctgatggaaaataaccactcatatggtcaattgtga

SEQ ID NO: 16870 - DNA, 477 bp, Glycine max
  unsure at all n locations
cgtcgatcctaagagtaataaaatcaaatcgctcacaacaacagtttgaatcncctgcttactactgcgctctgcagtggttatatttcccctttcaaaagagacaatgtcgtgtttgtactgatcactttgatcacctttgctgaaccatgagagtttaaatgaagcctgtctcgataataaagaaaataattaaaatcaatttgcttaagtaggagtaaatcagagtatatacattgcaattttagcaatagaaaagaggaatatgtctttgaagtaaaaatggtacaagatgtcttaccacagatttctaagttcaaatacatgggatcaataatacaagatgatggaaaaattaatgaagatgtcacgcaaaggatacaagcgggatggataaaatagagaaaggagtcaacggttatttgtaatcgcgaagtccctaccaatatcanggcaagtttatcgtactactatacg

SEQ ID NO: 16871 - DNA, 445 bp, Glycine max
  unsure at all n locations
agcttggatgctatccattatttntgtaagactatgtattgcattcgaaatattgtgtttacgtgcctttttttgtacactcaaaattctattttgaagtagactaatgtaatgtatcatgcccctaatgaactacaagactganagttgtgtgttctattagactgggatatgcgtttgaaaattgtttttgggattgctcgagggctcctttatatgcatgaagattctaggttgaggattattgatagggacttcaaaacaagcaacattctactaaaattctgattggagaactataccaaaattacctcctaaggagttgtatctaacttttgtccttantttgtatttgtcacactttacataatcataccagacaaatctcttattttgtctacatttcacattnnttgtaatgcaatgggtatatgtgtccataata

SEQ ID NO: 16872 - DNA, 391 bp, Glycine max
caggttgagttctgcttaccacccacagactgacggtcaaaccgtgcgttctattcaatccttaaaagaactcttgagagcctgtgtgttagagtagacgggtacttggaatagtttcttacccttgatagagtttacatacaacaatagttttcactccagtataggtatggcaccttacgaggcattgtatggtagaagatgtaagacacctctatgttgggtagattccagtgagagcattgccttacgacctgaggtagttcaccataccattgaaaatgtcaagttgatccaagataggatgacagcagcccaaagtatgcagaacagctactatgatcagagaagagaggatcttgaatttgctataagtgatcatgtatttctg

SEQ ID NO: 16873 - DNA, 444 bp, Glycine max
  unsure at all n locations
caggtagagttcttcttaccacccatagactgagagnctttcctgcgctccattcaatccttagaggacctcttgagagcctgcgtgttaaaatatgggggtagctgggatagtttcttacccttgattctacctacaacaatagctttcactccaatataggcatggcaccttacaaggagctgtatggtaagagatgtaagacacctgtatgttgggtaaataccagtgagaacattgtcttaggacctgaggtggttcagcaaatcactggaaaggtcaagctaatctaagaaagaatgagaacaacccactgtacgttgaagagctaccatgatacgagacgaatggaccttgaattctccgtaggcgaccatgtattcccgatagtcactacatccactgggttggtatggcattgaagtacacatagctcacacctag

SEQ ID NO: 16874 - DNA, 412 bp, Glycine max
ctcaactgaatttacaacattccaattgatttcaaaatggtgtattttattacaatgatatggtaatcgattaccagtgtgtttgaatgttgaaattcatattcaattgcgaagagtcacatcctttcacataagtgctgtatgtaatcgattacaatgatttggcaatcgattaccagggatgtgttttgaatacaaatcactagatgtaactcttccaatggttctcaagtctctctaaaggctataactcatctattggccttcttgacctgacttgacgagtctatataaccaagaccttaacttgcattgtacacacattgattacaatcttatatatcctttgaatctctttgaacctcctcttgaatgtcttcttatcttcctttgccaaagctttctaaagttt

SEQ ID NO: 16875 - DNA, 374 bp, Glycine max
  unsure at all n locations
agcttctaatgtataacaaagtgactctatnttcagggtgaatcattacgctgcttgtcctgaaatgactctgaatgatcacaacttgattgggtttggagaacacacagacccacaaatcatctctctgttaagatccaacaacacttcaggccttcagatttatcttagagatggaaactggatgtcagtcccaccagatgacagatcctttattattaacgctggtgatactcttcatgtacaacataaagcatgctattgacgcatactaatgagttcaatgaagaaattgtcattttctttctccttatgacttacgtatctctatggataagtataaaataataaatatacaaactcctcttttaagt

SEQ ID NO: 16876 - DNA, 435 bp, Glycine max
  unsure at all n locations
agcttttcatttaccttcacaataagggaaaaatgttattagaactaattaataaatacaaaaaagaactaaaatgacagccataagtatgtacctttgattntttcttcaaattataattatggcgaagtcaatccccctgcaaatgagcgcttcaatagattcttcatttagtttagaacaatactcatcaattaccctacccttagcactaaatgtagactctgaaactactgttgatattggaatagctagtatgtcacccgccatctttgataaaaccttgtattttaggctattgttcctccaccactctaacacactanaataagagttactagtttcaggaatataaacattctccttaagataatcctctaattctgagttcactggaggggtggcttcatttgcacgcacaatgttcattatttg

SEQ ID NO: 16877 - DNA, 392 bp, Glycine max
  unsure at all n locations
agcttgaaggtttactagatgcattggttaacttggtaacccagctggccttgaatcataaatcggtacctgtcgcaagagtctgtggtttatgctcctctgctgaccaccatacatacctttgcccttccatgcagcaacctggaacaattgagcagcctgaagcttatgttgcaaacatttacaatagacctcctcaacctcagcaacaaaatcaaccacagcagaacaattatgacctctccaggggaccatccgttgttgggatgcgaccctcattngaccacttcgaggtacttggcacccatcgttaggcaatttgtgaagttccatgacgtgccggaagtcgaaagaaagcattgtagcacgatccgtgaagttccgcgacatgc

SEQ ID NO: 16878 - DNA, 370 bp, Glycine max
  unsure at all n locations
agcttctacatatgggactgngaacactctaagggcccttgtcctaatggtataaaatatatgttcatcatggatttatgggatgtaatgaaaaaatattttttggcatttcttgatgaattacacataaatgggagactagataaagtggtcagtagatcttttattgttctgttacctgaaaaaagaaaacctaatgtctatgggggataatatatccctgatagggtgtttgtataaaatgttggcacagatgtttgctaataagttaaaatgggttattgatgatgttatttccacaacccaatctacttttatatcagggaggaaaatgctggatcgggtactcattgctattgattggttcatg

SEQ ID NO: 16879 - DNA, 432 bp, Glycine max
  unsure at all n locations
tcaagaatcaagatcaagatcaagattcanaattcaagattcattattcaagagaagacttaatcaagataagtatgaaaggacttttcaaaaactgagtagcacatggatttttcacaaaacatgtttaccaaagagtttttactctctggtaatcgattaccagattattgtaattgattaccaatagcaaaatggatttgaaaaagttttcaaactgaatttacaacgttccaattgatttcaaaaagttttaattgattacaatgttttggtaatcgattaccagtgcctttgaacgttgaaattcaaattcaaatgtgaagagtcacatcctttcacataaaagccttgtgtaatcgattacactgatttggtaattgattaccagtgaattgtttctgaataaatcanaatatgtaactcttcaaa

SEQ ID NO: 16880 - DNA, 449 bp, Glycine max
  unsure at all n locations
agcttatccattctacccattgaaacgatagatcctgaagaanatggggggaggggggttagcattatagaatagaataacagaattactttgatttaaatcctggcaaccagaagatagcattacctgccaaattggcaattcctatgcagacatttgcaatgtctgatggcactccagcacttttaaaaacagttgaagagaaataaaacacagcatttataccagatagctgttgtaaagcanatagggttgatccaataaaaacaactgctaaacgaacttgtgaataaaaaataacttttggaaacctaaggaaaccagtgaccagataacaacaatggcaaatacactcacaagtcacaactatcccagagacaaaccaggaaaaatgcatacctttagaatgacgaccatgaangcaattcgacagcttcacactatcacta

SEQ ID NO: 16881 - DNA, 408 bp, Glycine max
  unsure at all n locations
agctnntgcgttcgatttcttagtgcaattctccattctcaacctttttcggagccccatggattgagttttcgttcatgcgtactccaccttcgagtatggagccatgcgtagtgattgcttagttcaattctccattctcaacccctttttcgcagccccatgaattgcgatttggttcatgtgtcctccaccttcgagtctggagccatgcgtagtgattgcttagtgcaattctccattctccaccctttgtcggagcccatgaattgcgtattcgttcatgtgtcctccaccttcgagtttgaagctctgcgtagtgatttcttagtgcaattctccattctcaagctttatcggagccccatgaattgagttatcgttcatgcctcctccaccttcgagttt

SEQ ID NO: 16882 - DNA, 426 bp, Glycine max
  unsure at all n locations
ntacagcggatgccactctactccaaattcttgaaggatatgttttcaatgaaacataagtatattcaccaagaaaacattatagtggaaggacattgtagtcttgtgattcaaaagatccttccacccaagcataaagaccttgggagtataactatttcttgttcaattggagaagtcactatgggaaaagctcttattgacctgngagccagtataaatttaatgttgctctccatgtgtagaatgttgggagcgttagagatcatgcccactagaatgactctacaattggctgaccgctccattaccagaccatatggagtaattgcagatgtgctggtcaaagggaaacatctcatcttcccggtagacttcgtggtattggatatttgtgaatatactgacattcctgtaatattggga

SEQ ID NO: 16883 - DNA, 376 bp, Glycine max
  unsure at all n locations
agcttgcncacttgtcttattctatatgaagggctctgatttcttgagtagtttgtagaatggctttccctttttggtgagctttgggaagaacctggacagacatgctagcctttcattcagcttcagcttctacacttcttggatgttggttgggttgcgcatgatcagtatggtagtgcatttgttgnggttggcttcaatcccctagtgagtgatcatgaagtcgaggaacatgcctctgtctacccaaacagtacatttatcatggttgaggcacatgtcatattagtgaagtttccacaagacttcttccaggtcagtcacatgttgggctatgctccgagacatgtctatgatgtcgtgcacatatacc

SEQ ID NO: 16884 - DNA, 472 bp, Glycine max
  unsure at all n locations
ctcctttctgggttgatgacccagtatgggtaggtgacccagaatatgttgtangttgccttttggttattggctctggtagagccagtagaacctcttttccttttgtactggatcttcctcctctgccggaggaactagacaccataggaggcatcgggaattttctgtaaaaattcacgggtgagatagtcaggtagagagttggaagagcccttgatatattctatattaaaatcaaagacacttaaaattgcttgccatcttgcaaaaatctgttttgaggcaaggttttttacatccttctgtanaatgtctttggctgatttgcagtcaacccttactaaaaatttttgatttaataaatcagattgaaatttggaaatgcacaaaacaattgctaaaacttcttttttgacagttgaatactttaattgtgcaggattccagtgttntgaagtatatgcaatga

SEQ ID NO: 16885 - DNA, 413 bp, Glycine max
  unsure at all n locations
agccctatanatttttatatggcttgaaacaagcactgaggcagtggtacaagaagtttaatgagtttatcagcaactcaggattcaacagatgtgacatgaaccattgctgctatgttaagaaatatactaatagttatgttatccttatcgtgtatgttgatgacatgttgattgcaggatctagtatgacagaaattaacaggttgaagcaacagttggcagaaaactttgaaatgaaggatcttggtccagctaaacaaatccttggtatgagaattcttagaaacagatcagaaagaattttgaagttgtctcatgagaaatatatacacaaagttgcttgacaagttttaccttgaagattctaagaccaggaatacccctttgggatctcattagaagtttcaaag

SEQ ID NO: 16886 - DNA, 463 bp, Glycine max
tactgttagaacttcttcagatccaatctcatgaccaccatagacaaaaagtttccccccgctattattggcacaccaatgtagaacaataatagggagtcttctatcagctgatgataattgaagcttgacaacattgtttgacaatctttcaacttgttggtcagggggaaagtcagcagttgacaaatcccaaaacattatatcaccatctacataacccacaacaaccaccgatccatcattagatgcccaagatacagagcttatctccttatcctcctcttcatggtctaatttatcatcagaaagctgaaccctagagtcatttggataactagtcactatttttctcttcaatttgatgtccttgtggcctctaatgagaacaattcgatcttcagaagcatcccagagtaccatcaaaccattttcgtatgcaattagcagtctgcaaaatgac

SEQ ID NO: 16887 - DNA, 449 bp, Glycine max
  unsure at all n locations
tgccttgccccatgatatatntgagggacttatgatcactatgtttgactaattccttgngataaaggtagtgttgccatgttttcaaagcccgtactaaggcatacaactcctaatcataagttgaatagttaagggtaggaccacttagcttttcactaaaataagcaattggatggccttcttgcatcaacacagccccaatcccaacatttgaagcatcacactcaatttcaaaagaattttgaaagtttggcaacgcgagtatggtggcattagttagcttttgcttaagaacattgaaagcttcttcttgtttctctccccatttgaaaccaacattnttcttgagcacttcattgagaggtgctgccaatgtgctaaaatccttcacaaatcgtctataaaaacttgctaagccatgtgtcgcaacctacccttcggcggga

SEQ ID NO: 16888 - DNA, 446 bp, Glycine max
taagctccttcaactgcacaaggctcttaatatttgaaaagtattcttgtggaacattcacccgacgaagacactgacaaaaacttatcttcttctttttggacaaggtatggcaagctgggggcaagaaaattttcttcccatcagaccttggatgcaactatgatcatatccccatatcagctagatcttgataggtattcaagtcatccttcgtcttgccttgaatgttaaggagcgttccaatcacactgtcacaaaaaattttctccacattcataacatcaatacaatgtctaacgtctagatcagaccagtacagaagatcaaagatgatggacctcttcttccatatgcaactattacttttatccttcttttgggtctttccaaatacagtattcagggtgttgaacccgctgatatacctgctcaccagtcaacag

SEQ ID NO: 16889 - DNA, 402 bp, Glycine max
  unsure at all n locations
ctgagatggtatctggtcttagaanttaatttgctaagatcctattctgtgcgattggccaacctgaggaatggtgtagtcttgctgctgactacttgcattgtggccccctgcagctcccattcatatacctagggatgcctataggtgttaaccctagaaggaaggtggtgtgggagcctataatcagaaaanttgaagccaaattgaacaaatggaaccacagaagcatctctatggctggcagaattaccttaatcaatgctgtcttgacagctttgcccttgttttatatgtcttntttcagggccccttcagcagtcatcaagaggctcactactatccaaagacaatttctttggggtggaaacttggaaggaaaaaagatagcttggatctcat

SEQ ID NO: 16890 - DNA, 394 bp, Glycine max
agcttctcgatctattatgcgcctgaatcggacctccgagttaaaagttatgaccattaaaatttctcaagagcttccgttgattaattccgtgcgtctcgatatattatgtgcctgaatcggacctctgagctaaaagttatgaccatatagaatatctcgagagcttgcgttgttcaatttcatgcgtctcgatatattatttgcctgaatcggacctccgagttaaaagttatgaccatttgaatttcttgagagctctcgttgttcaatttcgagcgtctcgatatattatgttcctgaatcgaacctccgagtgactatttatgaccatctgaatagctcatcagcttccattgttcaatttggagcatctcgatatatgatgcgcctg

SEQ ID NO: 16891 - DNA, 388 bp, Glycine max
  unsure at all n locations
ctcaagaaattcanatggtcctaacttttaactcggaggtccgattgatgtggtttttatatcgacacgctccaaattgaacaatggaagctcttgagcaattcacatggtcataaatagtcagtcggaggtccgattcaggcgcataatttatcgagacgctcgatattgaacaacggaagctctcaagaagttcatatggtcataactattaagtcggaggtccgattcacgcacataatatatctagacgcacgaaattgaacaacggaagctctcgagaaattcaaatggtcaaaacttttaactcggaggtccgattcaggcacattatatatcgagacgctcaaaattgaacaacggaagctctcgagagattcatatggtc

SEQ ID NO: 16892 - DNA, 456 bp, Glycine max
cgtgatagatatgaatgttcaaaaccaatacaagagagagaattttattctttattttattctaatcgaccataaaaagttaaataaaaataaatgtggactttgaaactctgattatcttcgttattattatattagttaaattaaacaattttagtaaggacgtctagctagctcaatagattgatatagtatttaatttctgtggataaaaaaaatctttgtttgatactttaattttattctattctaaaagaaattatttttattaatagcttaattatataattcgtcatttaattataattaaaaattccattgagttcgtcaattattaaaacattaaaatctcttaattgtttaaaacatttccgttattattttttgtccattacagaatcaattatataattgagtcctttattaaattaatgaaattgcacatgtgatcacaca

SEQ ID NO: 16893 - DNA, 405 bp, Glycine max
  unsure at all n locations
agctttgagttttntcaaccattgaatcaaaattctaatgtatatgtatatatctatctatatttgtttaccaatgatcgaaattttaatttgacaacaatgattgatttggtactatatgtaaaggaagcttaatactttgtcagccgttggttataaattttaattaataattattgatttcattcaataaatatctagtatacttaaacatttattgttgaatcaaaattctaattctataacaatcattcatatggctattgtaaaaatatttgtagaaaagacatccaatattttatgcaacggaatttttttgtaaaaaagtttacacatttacaacaaacagaattttttactcccttgattgtattttactcccatcgttttataatcaatttaaaa

SEQ ID NO: 16894 - DNA, 465 bp, Glycine max
cttcttggtgggttgatgcactctatctcgtagaatggtatgatcactatcagacatattctcaatcaattcagttgcctcttcaagggttttcaattctatcttccctcctgctgaagcatctaacaactgcttggtttgtggtctcagcccatctataaacatgttcaattgaattggctcagagaatccatgtgtgggagtctttcttaacaaaccccgaaacctctccaatgcttcactcaaggactcatcagggaactggtgaaatgatgaaataacaactttcccttttgcagtctttgactcggggaagtatttcttcagaaatttctcaacaacttcctcccacgtcttcaaatttttgcctttgaatgaatggagccacttcttggcttcccctgccaaagaaaatgagaataaactgagcctgatggcatcatttggcactcctgcaatctttat

SEQ ID NO: 16895 - DNA, 445 bp, Glycine max
  unsure at all n locations
tgccttgccccatgatatatttgagggacttatgatcactatgtatgacaaattccttgngataaaggtagtgttgccatgttttcaaagcccgtactaaggcatacaactcctaatcataagttgaatagttaagggtaggaccacttagcttttcactaaaataagcaattggatggccttcttgcatcaacacagccccaatcccaacatttgaagcatcacactcaatttcaaaagatttttgaaagtttggcaacgcgagtatggnggcattagttagctgttgcttaagaacattgaaagcttcttcttgtttctctccccatttgaaaccaacatttttcttgagcacttcattgagaggtgctgccaatgtgctaaaatccttcacaaatcgtctataaaaacttgctaagccatgtgtcgcaacctacccttctgc

SEQ ID NO: 16896 - DNA, 434 bp, Glycine max
  unsure at all n locations
agctntgaaatctgaagtttaatattcaaatgatcaaagttcanaaaaaatgcacacacatgacctctatttatagcctaagtgtcacacaaaattggagggtttgaaattgaatttgtggagccaaactttggagccaaaatttcactaattatgattagtgaattttagttatggttcagcccactaatccaagatcaaatataatattctccactaagtgtgcttaggtgtcatgaggcatgaaaagcatgaaggacatgcacaaagtgtgactatatgatgtggcaatgaggtgtagtaagcaaatgctcacctgcccctctaaaatntaattggattgngcttctaccaattcaattaaatttatttccaaccacacacatcaaatatccacttagtgcatgtgaaattacataactacccctaataca

SEQ ID NO: 16897 - DNA, 470 bp, Glycine max
  unsure at all n locations
tgtagggttaaagtctcacgattgtcacgtgctcatgcaacaatttgtttccgtggctatacgagacatcttgccaaacaaagtcaggttcacgataacttgcctgtgctttttcttccatgctatgtgtagcaaagtgattgatccagtaatgtttgatgagttggaaaacgagaccgcaattatactatgccagttggagatgtattttccccctgctttctttgacatcatgattcacttgattgtgcatctggtcagagaaatcaaatgtcgtggtcctgtttatctacggtggatgtacccggttgagcgatacatgaagatcttaaaagagtatacaaagaatctatatcatccgaaagcatctattgttgagaggtacattgcagaagaagccattgaatnttgttcagaatacttagagacggctaaagctgttgggcttcctgagtgtcngcatgatgaca

SEQ ID NO: 16898 - DNA, 473 bp, Glycine max
  unsure at all n locations
tgcttanacttgtgatcattctgcacagaacgcaacctatttattattaacaatntcatatcactctcctaaacttacaacatacaaatttaagcaagaattcagataacaaattccactctcctcccttctatttaaccaactcaaaacagttcaaaatccaattgaccactaatcacaaccaatggaactcggattctcgtactatcatttccacaaagacacaaacagctaataaagtcggtattatgtaaagcttgctcgctcgcatagtacctcatcagcaagaattttagagcagttgaagcaaacacaacgcattatagttaagacggtcttcaaaaaaccaatatggaacattggcttagcaagctccaagtgcccaaaatggccagggcactcagccatactcgccgtgcaagtttcacacttcaactgtctgtcaatgggtccaagccgagggtcactcaatc

SEQ ID NO: 16899 - DNA, 375 bp, Glycine max
  unsure at all n locations
tagcttgagctctcacccaatcttgcaacacaatgttgggtccaaggttatcaaactcgacagtttacgtagactcgtaagagttccatagactcaactcgtagacttatacgagtccacttcatataaaaataataacaaaatatctataaataacataccaattaaacattntaacaatataataaagcagaatagtaaatcataaatttcacaatactgaaataaccaagtctagtaatgcatcactactagataataacttgcagattttatagtagtggtagagcattcccatcaaggatttgatgttattagagaatacgggtttgatgttattagaggtgagagtttttcaattcaggaacaacacac

SEQ ID NO: 16900 - DNA, 457 bp, Glycine max
cgccgccgccaactccctctccacgcagctgccagagttctgcttcgtcgtccacctcctctgcttcccggaggtccagcccagcctcgagaaacacaccgaagacgtcgatttccaaacctacgataactctcagaacttctccaactacggaacgagtcgacccggcggaaccgactcgttcagaaactacgccaccaccttctccagccgttccgacaacagtttccgccgctacagccgccgatccgccggccacgaggacagcttcgtcctctacggaggctccatcggcgacatctaccagaccttcaacacctatggcacttcctccgctggcggcgccggcgagttcaaacagtacgccaccgaatcaaacttccccgagcttgatttcaccacctactccgacagctccggcgggaggaggcagtcgttctcgagctacggcgagaac

SEQ ID NO: 16901 - DNA, 393 bp, Glycine max
  unsure at all n locations
agcttcttttgtttgggatgtgtgctctatcacgcaagattgtatggtcactagcagccatattcttaattaattccatggcttcttcaggggtcttcaattntatttttccccctgcagaagcatctaaaagcttcttggattgtggccttaacccgtcactaaaaatattgagttggattggttctgaaaatccatgagtaggtgtctttcttagtaacccacgaaatctttccaaagcctcactcaaggactcgtctggaaattgatgaaaggatgagatgacagcttttccttcagcagtcttggactctatgaagtatttcttcaagtatttttcaaccacttcattccaagtcttaagactgttaccttataatgaatggagccatc

SEQ ID NO: 16902 - DNA, 447 bp, Glycine max
  unsure at all n locations
ctcatgtcaacgatggagcaaatgctagtgctgttgggaggtttctcaattgctgatttctacccttcaatcaaagtgcttccattgctcacaggaatgaaaagtaaacttgaaagggcgcacagagagaatgacaagatcctacaaaatatggtcaaggatcacaaggaaaatgagaacaagaatggggtgacgcacgaggatattattgatattcttctcanaactcanaagagagatgacttggaaattcccttgactcacaacaacgtcaaagcactcatctgggttagtatgcaattttctttaacattactttaagattcccatgtatacaactatatacgtgcatagatatgaaatttgctgaaataataacttacactttaatatatatagagagagagggagagagagaaaattgagtagcgacttattaataaaata

SEQ ID NO: 16903 - DNA, 327 bp, Glycine max
acacctgacatcacctatgcaggaagtgtttgtgcaaaatatcaagccaatcctaagataagtcacttgaatcaagtagagagacatctgaaagatgtatatggcaccagcgactatgggattatgtactgccatcgttcagatccatcgctggtcgggaatcgtgacgctgattgcgctggacgtgcacacgacagaaaaagcacttctggagaacgttcctattggggaaccaatcctatatcatgggtcaacaagaagcagaactgtgtgtcctatctactgcagaagccgagtatattgcagcaggagacactcgacacaact

SEQ ID NO: 16904 - DNA, 374 bp, Glycine max
  unsure at all n locations
agcnttgatgcatcatttggagaggttaatgaaacaacgagatgatgcgctccatgagaggttggatcaaatggagaatagagatcataatgaagaagaaaggaggagaagagggaatgatggtgttcctagacaaaaccgaattgatggtattaaactcaacattcctccatttaaaggaaagaatgatccggaggcctacttggagtgggagatgaaaatagagcatgtattctcatgcaacaactgaggaggacaaaaaggtgaagcttgccgcccacggaatttccgactatgctcttgtgtggtggaacaagctacaaaaggagagagcaagaaatgaagagccaatggttgatacatggacggagatg

SEQ ID NO: 16905 - DNA, 439 bp, Glycine max
  unsure at all n locations
acactataaaactaagcttgagatattaaacaacaatactnttactcgttgtctgattgagtcatgtaatatttcgagacgctcgaaattgaatacggaagctctgagcaaattcaaacgacaataactttttactcggatgtctgattgaatcccataatatatcgacaagctcgaaatagaatcttgatgctctgagcaaattcaaacgacaataactttttactcggatgtctgattgagtcctgtaatatatcgagacgcttgaaattgaatacggaagctctgagcaaattcaaacgacaataactttctactcggatgtctgattgaatcccataatatatcgacacgctcgaaatagaatcttgatgctctgagcacattcaaacgaccataactttttactcggatgtccgattgagtcctgtaatatatc

SEQ ID NO: 16906 - DNA, 371 bp, Glycine max
  unsure at all n locations
atctgctcgtcttgctgatatttatcatgcacactnttctgatgatgacctangaacaattagggatcaacttgaaacttatgtgcttcaagtgagaagaaatgcttctttgtccacttgtgaagatgttcaaagtttggctatgaagatggttcagactgagaaacatttggtatttccattggtttataaacttattgagctagctntgatattgccggtgtcgacagcatccgttgaaagagctntttcatcaatgaagattatcaagtctaaattgcgcaataagatcaacgatgtgtggttcaatgacttgatggtatgttacaccgagcgggagatattcaagtcgcttgatgatattgatatta

SEQ ID NO: 16907 - DNA, 430 bp, Glycine max
  unsure at all n locations
agttttataatgtagcagttccagggaccatcgacgaacgggcgatcaatacaaaaagaatactcaatccatgggaaaggaatgaaaatcacacactntgcctcaactctgctaaagcaattggatgtacagtggtcaacattggcactcangacttcattgaaggaagggtatgtttgtaggccttctagtttccacccataaaagcagaattattgtgggcatgtacactgcagaaccacaaaatttaagatttaatttaatttataaatgaaatctggtcagatttgattatttctcgatcaaagtaattctcaatcaagttaaccccttttttaaatgattccgaatgctggtaaagtatctntatagcatgctacattnttttacagtcaaagcctntctctattctttntggcaatgctacaca

SEQ ID NO: 16908 - DNA, 429 bp, Glycine max
  unsure at all n locations
tgttgaagtctaaatagatggtgactagacatttngtgattcaaactccatagaaggtatatagcaactatttaattaaaaaacaacctaagaattcatttagttcatatatttcgaggagagctactggtttgtttggagtagtgcattcagatgtgtgtggaccatttatggttccttctcttggtgggaacaatattttgtttcctttgtagatgaatttagcagaatgttgtggatctttcttatcaagtccaagtcaaaaaaattttcaatctttaagaattttaagttacttgttgaaaagcaatctgaaaaaacatattaagatacttatgactgatggtggagttgagttgagtatacctttaaagagtttgaagattattgcaaaggatntggcattcaacatgaagtgatattaatatg

SEQ ID NO: 16909 - DNA, 430 bp, Glycine max
tgataaatctatatatggtttaaaacaagcctcccgtttttggtaccttaagtttcatgggataatttcttcatttggttttgatgaaaaccccatggatcaatgcatataccacaaggtcagtgggagtaaaatatgttttctttttttatatgtagatgatattttacttgtagccaatgatcaagttttgctacatgaggtgaaacaatttctctctaagaattttgaaatgaaggatatgggtgatgcatcttatgtcatcgacattaagattcatagagatagatctcgaggtattttgggtctatcacaggaaacttatattaacaaaattctagagagatttcagatgaaagattgttcaccaaatgttgctctcattgtgaagggtgataggtttaatttgaaccaatgtccaaagaatgac

SEQ ID NO: 16910 - DNA, 393 bp, Glycine max
  unsure at all n locations
agcttgtatggttaaagtctcacgattttcacgtgctcatgcaacaattgttagtcgtggctatacaagacatcttgccaaacaaagtcaggttagccataactcgcctgtgctttttcttccatgctatatgtagcaaagtcattgatcctgtcaagtttgatgagttggaaaatgaggccgcaattatactgtgccagttggagatgtttttccccctgctttctttgacatcatgattcacttgattgtgcatttggtctgagaaatcaaatgttgtgatcctgtttatctacggtggatgtacccggttgagcgatacatanagatcttangagggtatacaaagaatctatatcgtccagaagcatctattgttgagaggtacattac

SEQ ID NO: 16911 - DNA, 434 bp, Glycine max
tcttggatgcttactccagatacaactagattaggatttttgctccaaaggaggcgaagatgacatttatcactaaagataccaacttttgctaaagggctatgccctttcagcctaaaaaatgtagacgctacataccaatgactgatggaccgagtctttaaacaacaaataagacaaaacatcaaggtatatgtggacaacgttggcggtaagtctcgaagcatagtccaacatgtggcagatctgcaagaagtcttcaaggaactttacaagtatgacatgcgcctcaaccctgaaaaatgtactttcggggtaggcagaggcaagttcctcgacttcatgatcactcaccaagggattgaagccaaccctaacaaatgccctaccatactagagatgcacagcccgaccaacatccaagaagtctagaa

SEQ ID NO: 16912 - DNA, 359 bp, Glycine max
  unsure at all n locations
atctttgagcaaattcaggcgacaatatctttttactcgtatgtctgattgagtcccgtcatataacgagacgctcgaaattgaatgttgaagctctgagccaattcaaacgacaataactttttactcggatgtctgattgaatcctgtcatatatcgagacgctcgaaattgaatgttgaacctctgagcgaattcaaacgacaataactttttactcagatgtctgatatagtctcgtaatatatcgagacgctcgaaattgaatgttgaagctctgagcaaattcaaacgacaataactttntactcggatgtctgattgagtcccgtcatacatcgagacgctcaaaattgaat

SEQ ID NO: 16913 - DNA, 427 bp, Glycine max
  unsure at all n locations
tcaacattcaattttgagcgtctcgtaattttactgtattcaatcagacatccgagtaaaaatttattgtcgtttggattggctcagagattcaacattcaatttcgagcgtctcgatatattacgggcctcaatcagacatccgagtaaaaagttattgtcgtttgaattggttcagagcttcaacattcaatttcgagcgtctcgatatatgaccggactcaatcagacatccgagtaaaaagttattgtcgtttgaattggctcaaagcttcaacattcaattttgagcgtctcgatatattacgggactcaatcagacatccgagtaaaaagttattgtcgtttgaattggctcagagattcaacattcaatntcgagcgtctcgatatattacgggactcattcagacatccgagtaaaaag

SEQ ID NO: 16914 - DNA, 414 bp, Glycine max
  unsure at all n locations
tagccattgcgaattatatgcagtcgaacatatattattatgatctttatctttattctttagtataaacagaaaagatcgactttgatcagtatatgtcctatggcaatctattaaacaatttaattaattaattattcgacagaatacatatctgcaagtttcaatatatattttattcaacccaaaacttatctatatcaggaatatgagtaattatgtttcaacaccataaatatttaaagaaaaaagtaaattagttcgatatagctataactaaatcatagcagattatcaatcaagttacatgtagtagtgtatcctattgaaatgaaactatctttgagagtcttatgagctaagcacgttagaatntggaattagggtatcaggtggcccatgcattccaccact

SEQ ID NO: 16915 - DNA, 419 bp, Glycine max
  unsure at all n locations
agttttttcttgtttctctccccatttgaaaccaacatttttcttgagcacttcattgagaggtgctgccaatgtgctaaaatccttcacaaattgtctataaaaacttgctaagccatgaaaactcctcacctcggtcacggacttangtgtaggccattcttgaatagccctaaccttctcctcatcaacttgcactccttttgaactcacaacaaaaccaagaaacacaacatggttagtacaaaagatgcatttttcaagattggcatacaattgttcttctctaagcacagtcaagacagattntaaatgatcaatatgcaaatcaagtgaagtgttatagataagaatatcatcaaagtacaccacaacgaactttcctatgaactctctcaaatatggttcatagtctcatg

SEQ ID NO: 16916 - DNA, 431 bp, Glycine max
tccatcactgtatttggccagtttcatgattctctatattaagaagaaccgatacatccacagtgacaaaattatggtggaaggcaattgtagtgttgttgttcaacacattcttccacctaagtacaaagaacttggagttgtcatgataccgtgttccattggtaaggttgctgtaggaaaagctctcatagacttgggagctagtatcaacttaatgcctctttccatgtgctggtgacttggagagatagtgataatacatacacgcatgaccctctagttagcttattgctccatcgcaagaccatatggagtgattgaagatgttttggggaaggtgaaacaccttatattcccagctaattttgttgcgatagacatagaagaggacgctgatattcctctcattcttggtcccccattcatgt

SEQ ID NO: 16917 - DNA, 426 bp, Glycine max
  unsure at all n locations
tgaacctcatcgccactactagatgactccacttnctatctttctcctaaagacaacaccaagttaaaatcaatcatcacaattacttgccatcaaagctactacctttgcccataacttttccccttaggtcatagggagcatatacattaatcacctttgttggacaagaggcctcaataacttaagagggggagaaattaagtttcaaaatttcccactaactaacttttaacccttttttaaatgataggctcgaaatgcagaagaagaagcaacaatcaatttaataatgttctttaaacatgcaagacaaaattgattgcaataacataaatgagataagggaagagagaaatgcaaactcaatttatattggttcggccacttcacatgtctatgtccagtcctcaagcaacccacttg

SEQ ID NO: 16918 - DNA, 433 bp, Glycine max
tcaatacagtgacactagtgttgcaacaaaggagctgtcttagtcttttggatgggatacatatgattctttcatgcagcatgatgttcaagaactaaatcgggttctctgtgaaaaacttgaagacaaaatgaaggtatggcaagagatttggaatgtttgttcatgattcttcttgatgagtgatcataccaaatggttgttgtatgttatttttcttcaggaaactgttgttgagggaactatacaaaagttatttgaaggacaccatatgaattacattgaatgcatcaatgtagactacaaatcaactagaaaggagtcattttatggtacttccttatgcattttgaattcaattatatgtttagttcttctttgttatgtaattctaatttagtttttgcatatgcatgttagatcttcagcttga

SEQ ID NO: 16919 - DNA, 305 bp, Glycine max
  unsure at all n locations
agctttctgacctgagcatttgaattgagaaaaagctcattatcttcacggcagaattccccaatagcacgtacatcaacaaggttcccagagtctctaatttgaagaatgtgtatagtttgatagcgaagtgatacaattgccaataggtcatcatacaagaagacccccatattatgggttanattaacgaagtcattactgaagaccttcttgtccaagatctctccatcttccagtctaatttagtaattaatacgtgagaaatgggaacaatacataatctagagtgaacagagtatgat

SEQ ID NO: 16920 - DNA, 429 bp, Glycine max
  unsure at all n locations
tgtgcttcgaccaacccagcctcaatttacgtgccattgtgtaagttcttgcttaaaagtgcaaccttcaatgggaaatgtaacaacaagggtatttctataacaattgatggcactttggtggctccttcagattatagggtcaccgaaaactccggtaactggttggaattcgagcgtgtcaacggagtttcgattcacggcggggcgcttgacggccaaggcactgccttgtgggattgcaagaactccggcaaaggaaactgccccagcggagccacggtatgttaaattaattaatttaactctcatggattgaacattattcgttgacatgcacaatttcttgctcccattattattgttntgatttgatgttggaggtggagttgtggacttggtgattactgagagtttcttagtggggga

SEQ ID NO: 16921 - DNA, 420 bp, Glycine max
  unsure at all n locations
ntaccggtatccccattttcagaaaatggaggtgtttattcaagtcactgctatgctcgctgttggcttaatccaacctagccatagtctgttctcttctccgatactcctagttaagaagaaagacggaacctggcattaaagggcactaaaggaaatcacggttaaagattgttttcctatgccaaccattgatgaattactcgacgatttgggccaagcatcatggtttttgaagctcgatttatgccaaggatttcatcagatacgtatggtcaagacttacattcataagacagcttttcaaatgcactagggacattatgagtttaaggtcatgccctttggcctttataatgccccttctacttctcaagcaaccatgaatgatgcgctccaaccatttctgaggaaatatgt

SEQ ID NO: 16922 - DNA, 427 bp, Glycine max
ttcctttgagaatccacgaagcattatttctcttgtttaccaaagttaatgtcgctgattgaatggcagcaaaaagtgacaaaatagctgtactagagtattgacatgggtattttttgctaatctttgcttgtataatgaaccatgaagaccacaggaggcaacctagagtcagaagtatggagcctacaatccatttctctaacttggcagctggaagcgtgcttgtaattttgtttgctatgtgttgagattgtgggttgataaggggcattcctttataaaggaccaataacaaagctccaccaatgcacaccaaagttcccatgactttggctgtaccactcttgctttgcatgttcaccttctctaccctagaaaaatttcaagccaaaggatcaaaagtatttttcttgtattccacaat

SEQ ID NO: 16923 - DNA, 375 bp, Glycine max
  unsure at all n locations
agctttatggagattcatgcatcagggaacaatttcactttaaaagtgggtcccaattggcttcctaattttcagcttttccatttggatgtgagatcatggcagttaggtcccagctttccatcgtggattaagtcacaaaacaaacttgaatatttagacatgtctaacgcagggattattgattctattcccacacagatgtgggaagcacttcctcaggttttgtatttaaacctctctcataatcacatccatggtgagagtgggactacattaaagaatccaatatctatccccgttattgatctaagctcanatcacttgtgtggtaaataccctatctttcaagtgatgtgtctcagttagatcttt

SEQ ID NO: 16924 - DNA, 428 bp, Glycine max
tagagagattcccgatctgagagggtactgctccgtctgcaacagctctcaggtcaagatacaccaaatttgagagattcccaatctgaggaggaatcttccccatgaatccagtatgagagaggttgaggtgagtcaaggaagtcattgtcccaaggaaagaaggaattgacataccttctccaaggtattcattggcgctcaagtccaagtaattcaaatgctttaaatcagccaaacaaggacttatctctccaccaaagctccatctcctataagcttcccaatcatcattgaaaatagaatctgaagagttgaggtgaagctgaagaagatgggaagtaaggttgtggcagaggactccataccagtggcaacagttggtattattatgattccaagaccaaagcctattggaaggatctatg

SEQ ID NO: 16925 - DNA, 365 bp, Glycine max
  unsure at all n locations
agtcttatcttatcatttagtaaaaaaaaaaaaagttggggacagtgtgtttcttttatctgtcaactttctcccgttttctcaattaaaatgggtttaatgatgacccacgttatggaaacaaattattgttctcacatanaatttgtatccattcgcttaatcaacaacatcatcgctaaagagcttaaattggtgggcatcaagaaccaatttccttatagaagagaatgcgcccattattccaacacccgtgaagaccaccataattgaggtgttaatccaataagtgaaggatgaatttggaggcttgtatgtcatgttgtacataagcataggcagaacgaaatccaaagggatgaaac

SEQ ID NO: 16926 - DNA, 434 bp, Glycine max
  unsure at all n locations
ntccaagatggccaagttcaagcctaacgatgggttatttattgaaaggtgcaatacaattctgtgtatgacattcaaattttactatgttagtaggtaagattaaggattgggcagtgttgtcatggactatcgaaaagatttccaagtaacaagaagcatccgatgatgttcgatagaattcatatattgttgttgctttagaaatatatttgttatttaattccaattatattttgaccaatttcattttacgtttttaacaaaactctttataattntagtctgctataatatacgaatcattgtagagtaatatcttaaaattttaatgattaactaagatcagtgtattatgcatttcaattaatataaaaacttgtatatctcatagtatataaaaacttgcatacttcataggaaatatttgataa

SEQ ID NO: 16927 - DNA, 390 bp, Glycine max
  unsure at all n locations
atttttttatgtgtctagctactatataaaataacaacatctatatggttattttttaaaaagaaaaatagtgaaaataaaaatatgaatcggtgaaattaaagaaaaagtatagtaatatggagaattgagttgatgatgatgacctgcatgagcatagaaccatgcagggccgagtgcttgaatgtgcctaaagtagcgtgcggtgatggctcccattggtaacaaaatgccccacgatatggcgttaacggtgccatggatcactctcaacgtcgtgagatccgtgtgctgtggagccgacgaacccgacaatacgtcanaggtaacaatggaagacagatcggtggaagtagttggatgaatggtgggagagtagccctgaacgta

SEQ ID NO: 16928 - DNA, 268 bp, Glycine max
tatctcttcaaatcattttgaaaaggcacgaactacctatatatatgggggtctgatttccaaaagcaagagagagatattcccagagaacttcattgtcaaatgctctctcaacaacttttgggcgaacacttgccaatctattaagagttcatccaagaacttcaaatgtaatatccttcttttaaagagagaattcttcttcttcttattaaaagagattgattaatggaccgagagtctcttaagttgtaaggattcctgaaca

SEQ ID NO: 16929 - DNA, 431 bp, Glycine max
tgataaatctatatatggtttaaaacaagcctcctgtctgtggtaccttaagtttcatgggataatttcttcatttggttttgatgaaaaccccatggatcaatgcatataccacaaggtcagtgggagtaaaatatgttttctttttttatatgtagatgatattttacttgtagccaatgatcaagttttgctacatgaggtgaaacaatttctctctaagaattttgaaatgaaggatatgggtgatgcatcttatgtcatcgacattaagattcatagagatagatctcgaggtattttgggtctatcacaggaaacttatattaacaaaattctagagagatttcagatgaaagattgttcaccaaatgttgctctcattgtgaagggtgataggtttaatttgaaccaatgtccaaagaatgact

SEQ ID NO: 16930 - DNA, 430 bp, Glycine max
  unsure at all n locations
nttgcccaatatagctttgaaattntctcccccttgttcacaaccaagttacccttggtgagttttcactttccagaaccatggtggttatcataaccagcatcatcaagtacctgcacagagatcaaattaaagcgaacatctagagcatgtttcactcctctaagtagcaactgtattcccatgttggtttgcaaacaaacatcaccaacaccaatcaccttggacacgtcatcattacccatcttcaagactccaaaatcacctggagtgtaagatgtgaagaactccttcctgactgtaacatgcaatgtagtaccactatcaattatccacatattcttatcagatacaagattaagcgaatcagggtcatggagaataacaagatcatcactggtagcagtagtcacacagtcatcatcatgat

SEQ ID NO: 16931 - DNA, 369 bp, Glycine max
  unsure at all n locations
agcttcgtgcttaaatatgtatggcaaaacttcattactgttgttcaagacatagaagtgagcttgtaacaaatcttctacacttggagtgatcacctgcagtcctcttgaacccttaccacccactctgtcatcatgccgacactcangaagcccaacaactttagccttctctaagtattctgaacaaaattcaatggcttcttctgcaatgtacctctcaacaatagatgcttccggacgatatagattctttgtatacccttttaagatcttcatgtatcgctcaaccgggtacatccaccgtagataaacaggaccacaacatttgatttctcttgaccagatgcacatcaagtgaatcatgat

SEQ ID NO: 16932 - DNA, 377 bp, Glycine max
atgcttctttcactaatttataactggagaatatatttatgtttaacaaaactagttcataagttatataaaagtttactaatttttgaaaatttattacaatgacttattcaattataatagttgattaaaattgggaattgaagtagtgtaagataataaaaatggacatatatttttacataaattctagagtaaaatatgtttttagtccttaaaaaaatttacaaatttgattttagtcattaaacaatcttatttttgtccccctaatatagaaataataatgtcacaatatatactatcaagatcgaagatagagtatttccaatttagaggagcaaatacagacaaaagaatttagatgactctaaatc

SEQ ID NO: 16933 - DNA, 432 bp, Glycine max
  unsure at all n locations
tcgtgacgaactatttatggaaaaacttcattgtngttatttagtatatacaaatgagtttgttgcaatttctctaacatgcaaccctcgtgaaccctttcctcccactctctcatcatgctgagacttgggaagcccaaaaggttccaccttttcaatgtactttaaacaaaatttaatagcttcttttgcaatgtacctttcaacaatggatgcttcaagatggtatatattcttcgtatacccttttaagatcttcatttatcgctcaaccggacacatccatcgtaaataaataggatcacacaattgaacttcccttaccagatgaacaattaagtgaaccatgatgtccaaaaatgaaggaggaaaatacatctccagctaacataagataatagcagtctcattttccaagtcatctaactttat

SEQ ID NO: 16934 - DNA, 397 bp, Glycine max
  unsure at all n locations
agctttatacttgagattgaatagtttacaatctccgtccagatctagaagtcatagacaaccaacttaagaagaaaaagaggaaaaggagtattcatatggaacaagtcatggaagaaggcgaagaggtgaaccaagaatagataatcatttggggagcattaagatgacaatccctacatttcaaggcaaaaacaatcctgagttgtatttagagtgggagtgaaaggttgaacatgtgtttgattgccataattattctgaggaaaaaaagatttaactagttgttgttgaattccttgattatgctagtatttggtgggatcaacttgtgactaatangcacagaaatggtgaaaggcctattagtagatgggaggagatgaagactgtcatg

SEQ ID NO: 16935 - DNA, 397 bp, Glycine max
  unsure at all n locations
attttgtatctacatagagtagaagatagatcattgatccatcctccaccttgttgtgataaacacaacaatcatagagacttctcttgaatccttggctggtgataaagctatcaaacctcatgtaccattgccttggagattgtttcaaaccatacaaggacctttgcagttgacaaacatacctttcttttacttgaacttcaaacccttcacgctgtttcattagaatattttcttccaatcttccatggagaaaagcagtcttgacatcaagttgttcaagttccagatcttggtttgccactatagcaagcagaaccctgatggatgtatgcctaaccataagagaaaaaatntcgttgaaatctatntcttctttctagctgaatccctt

SEQ ID NO: 16936 - DNA, 381 bp, Glycine max
  unsure at all n locations
agcttgtattgtaagaaatgacaagaaactacggaatccgaaatagaatcaatgaagatcaacaaagtatgggctttagttgaagcttcaaaggatataaaaccaattggttgtaaatgagcttacaagaaaaggattggagcaaattggaaggttgaaacctacaaagctcatcttgttgccaagggatatgtcaaaagtaaggtatagattatgacaaaacttttctcccgtggcaatgctcanatcaattcggattctttttgctatagtagcatattatgatcatganatatgaaatggatatggaaaatggttttacttaatggtgagctaaaataatgtgtatatgacacaacctganggatcacaccttgtctg

SEQ ID NO: 16937 - DNA, 424 bp, Glycine max
tgtgtcacgattcactgtgacagtcaaagtgtcattttcttagaaaatcaccaaatgtaccatgagaggacaaagcacatagatgtgaaactacacttcatcatagatgtgattgaatctgagaaggtgaaggtggagaaggtttcaacaaaagaaaacctggctgatatgttcacaaagtccctctctagtgtcaagttcaagcactgcctggacttgatcaattttgaagatgcctaaagcagattggtagaagtgcagccctaaatcacaaggtagacacttgctgatttggagtcaaggtggagatttgtggtgtgtgactcaaaatcacattggctcaagtgagaaggttttaaagtggtgttgtcataactgtgttcagtcattataattgaattaggtttcacaccaatgtatagtc

SEQ ID NO: 16938 - DNA, 430 bp, Glycine max
acagcttcattaagaggcttcctctagaagcttcctcgtgacttcttcgagaagctttctcaagaggcttctttgagaagctacatccttatctatccacccctctattaactaaattaacttccttaaaaattattacggatgaaaataacgcaacaaataatcaaacatcaaacataattactaataatatatatatatatatatatatatatatatatatatatatatatcaaggtgttacaactctcccacccttttagaaatttcgtgctcaaaatttaccttactcaaacaaggatgggtgagcttctcgcatctgactttctaattcccacgtggcatcttctcctgatgcacctccccatatcaccttgaccaacggaatctctttccctcttaggtgtggtgtacgcctatcctcgatcct

SEQ ID NO: 16939 - DNA, 368 bp, Glycine max
tcttcttcgtgcttaaatatgtatggcaaaacttcattactgttgttcaagacatagaagtgagcttgtaacaaatcttctacacttggagtgatcacctgcagtcctcttgaacccttaccacccactctgtcatcatgccgacactcaggaagcccaacaactttagccttctctaagtattctgaacaaaattcaatggcttcttctgcaatgtacctctcaacaatagatgcttccggacgatatagattctttgtatacccttttaagatcttcatgtatcgctcaaccgggtacatccaccgtagataacaggaccacaacatttgatttctctgacagatgcacatcaagtgaatcatgat

SEQ ID NO: 16940 - DNA, 433 bp, Glycine max
  unsure at all n locations
ctgattntgtgaggaagataacggttcacttactatctatctttattacattcaaataacacatatatacatacagcaagaagaggagagagacagcttaacaagacaagacatattgttgtcttctaccataagctaagcaggaaattaggtaagataaaaaaaatagaaaatacacataattctaacactccccctcaagttggagcatataaatcgtatgcaccaagcttggagcatataaactgaatcttaggcctccttaaggacttagtcaaaatatcagctggctgatcattaaaattaatgaactcagtgacaatttctttggacagtagcttctctcggataaagtgacagtcaatctctatgtgcttggtcctcttatggaagactggatttgaagcaatgtgaatagcagcctgattatcac

SEQ ID NO: 16941 - DNA, 346 bp, Glycine max
  unsure at all n locations
atcttatgagagagtcaaagatcaaattgagaggaaaaataaaagttatgctaaacaagccaacaaagggagaaagaaggttgtcttcaaacccggagattgggtttgggtgcacatgagaaaagaaaggtttccggaacaaaggaaaacaaagcttcaaccaaggggagatggaccatttcaagtgcttgaaagaatcaatgacaacgcttacaaagttgagctgcccggtgagtataatgttagttccaccttcaatgtctctgatttatctctntntgatgcagaatggagaatccgattgaggacaaatccttctcaagagggagagaatgatgangacatg

SEQ ID NO: 16942 - DNA, 430 bp, Glycine max
  unsure at all n locations
taacaaaaggcatgcgaagagggtggaattcttatatcaattcccttatgttatcaaacataaaaagggaaaaggtaatattgtagccggtgctctttctcggcgtcatgcattactttctatgcttgaaacaaaattgattggtcttgaatgtttgaaaagcatgtatgaaaatgatgaaacttttggagaaatttttaaaaatcgtgaaaaattttcagaaaatggtttctttagacatgaaggctttcttttcaaagaaaacaaattgtgtgtgcctaaatgttctactacaaatttgcttgtttgtgaagcacatgaaggaggtttaatggggcattttggggtccaaaagactctagaaacattacaagaacattnttattggcctcatatganaaaggatgtgcagaaantttgtgaacattgc

SEQ ID NO: 16943 - DNA, 416 bp, Glycine max
  unsure at all n locations
gcttgtccgggaacagttatgcatgagttcatagatgtgtgctttcttgcgtccttccgaacagagtccaataagtatgacaacattaacatgagaagttctactgatacactattagaaaatatgttttctacatcggttatttatgactttcaacatcggcttttcagccgatgttgaaagtaccgacgttgatagtattatcgttaacatcggcttttgagaaaccgatgttaacgtaaaattaccaacatcggttatataaataaccgatgttgctaatatgaattacacccagacaatgtatattaatgttgaaagttaacatcggttcttactgaaaaccgatgttgttatcaagaanttttctttatataatgtctgtgtagacaaccgatgttaacgaatgtgtgact

SEQ ID NO: 16944 - DNA, 395 bp, Glycine max
agcttgaaggtaaactagatgccttggttaacctggtaacccaactggccatgaataaaaaatctgcacctgtcgccagactctgtggtttatgctcctctactgaccaccacacagacctttgcccttctatgcaacaatctgaagcaattgaacagcttgaagcttatgcttcaaacatctacaatagacctcctcaacctcagcatcaaaatcagtcacaacagaacaattatgacctctccagcaacaggtacaatcccgggtggaggaatcatcccaaccttagatggtcaaatccttcacaacaatagccttattttcagaatgctactggcccaagcagaccatacgttcctccaccaatccagcagcaacaacaacaacaacaacag

SEQ ID NO: 16945 - DNA, 422 bp, Glycine max
tcatagcttagcaagtgctcagtttcctgccaatgtaccccagaaagttgataagcacttcttcacagtgggccttggcacaactccctgccctcaaaatcaaacttgtcaaggacccaccaatgcaacaaaatttgcagcatcagtgaacaatgtctcttttatacaaccaaccactgcacttcttcaagcccacttctttggtcaatccaatggagtttactccccttactttcctattagtccattggttccatttaactatacaggcactccaccaaacaataccatggtgagcaatgggacaaaggttgtggttcttcccttcaacacaagtgtagaactagtgatgcaggacaccagcattcttggtgctgaaagtcaccctctccatttgcatggctttaacttctttgttgttg

SEQ ID NO: 16946 - DNA, 376 bp, Glycine max
agcttctacattcaattttgagcgtctcgtaatattacgggactcaatcagacatccgagtaaaaatttattgtcgtttggattggctcagagattcaacattcaatttcgagcgtctccatatattacgggactcattcagacatccgagtaaaaagctattgcagtttgaattagcttagagcttcaacaatcaatttcgagcgtctcgatatatcacgagactcaatcagacatccgagtaaaaagttattgtcgtttgaattggctcagagcttccacattcaatctcgagcgtgtcgatatattacaggcgtcaatcacacatccgagtaaaaagttattgtctgttgaatttgctcagagctttaacatt

SEQ ID NO: 16947 - DNA, 443 bp, Glycine max
  unsure at all n locations
ctgagccaattcaaacgacatattctttntactcggatgtctgattgagtcctgtaatataacgagacgctcgaaattgaatattgaacctctgaggaaattcaaacgacaataacttttttctcggatgtttgattgagactcgtattatatcgagacgctcgaaattgaatgttgaagctctgagctaattcaaacgacaataacgttttactcggatgtctgaatgagtcccgtaatatatcgagacgctcgaaattgaatgttgaatctctgagccaatccaaacgacaataaatttttactcggatgtctgattgaggcccgtaatatatcgagacgctcgaaattgaatgtggaagctctgagcaaattcaaacgacaataactttttactcggatgtctgattgaatcctgtcatatatcgagacgctcganattg

SEQ ID NO: 16948 - DNA, 376 bp, Glycine max
agcttgtttcctttacaattggagtcatgactaatgaacatgtacttctcacttttgtcatccaacttgtttgtatctcatttggcatgtgcacatgaccaatgcttccaaacacttttagatgtgaaatgacgggcttacttccattccatgcttcttgtggtgattatcctcatacactctttgatggagactggttagaaaggtaaactgcacaagccactgcttctgcccagaactcctttggaagtcttatgtggatcaagaggcctcaaaatacttatgaagggggggtcgaattaattattcctaaacctatactaataaagaaatcactcttctaacgcttttacttacgtttgtgagagaatattga

SEQ ID NO: 16949 - DNA, 436 bp, Glycine max
tgaatcggacctcagtgtgaaatgttatgaccattttaatttcacgagagcttccgttgttcattttcgaacgtctctatatgtgatgcgccttaatctaacatccgtgtgaaaagttatgaccatttgaatttctcaagagcttacgttgttcaattatgagcctctcgacatattatgcgcccgaatcggacatccgtttaaaaagttaagaccatttgtatttctcgaaagcttccttggttcaattccgagcatctcgacatattatttgcccgaatctgaccttcgtgtgaaaagttatgaccatttgaatttctcgagagcttccaatgtttaatttcgagcgactcgatatattataagcatgaatcggaccttagtgtaaaaagttatgaccatttgaatttctcaagagcttccgttgatcaatttt

SEQ ID NO: 16950 - DNA, 393 bp, Glycine max
agcttttaagataccgagaaagatagagctgtttgtaattttagtcctttgttctgtttgatactccataataaaatggtatattactattattattatttgttctaataaatcatttactattattattttattttatggtttgcgaaataaaaagaagataggaggtttttctagaggtgaatgatgagaccattccatgcctcttcaattaagtgtttttcattgaatctctatatttttgtcgggtcaataacatatttttgttatcagctggtgatcttattgatgatgagaattggcctccaattttcctaatcattcatcatgatattgccaataagataccgattcatgctcaaaggctgcaatatttggcctttgcaagttggt

SEQ ID NO: 16951 - DNA, 389 bp, Glycine max
agcttggcattgaacataacttttctgcacctagaacccctcaacaaaatggagttgttgaaagaaaaaataggtctttggaagaaattgctagaaccttattaaatgatactcctcttccaaaatatttttgggctgaagccgataatactgcatgctatatcatgaatagggctttaataagacccattttaaagaaaactccatatgaactattcaatggtaggaaaccaaacatctcgcatcttcatgtttttggttgcaagtgttttgtattaaacaatggaaaaagaaaacttaggaaagtttgatgctaagtaagatgaaggaattttccttggttattctttgcatagtaaagcttatagaatatataataagataacaat

SEQ ID NO: 16952 - DNA, 441 bp, Glycine max
  unsure at all n locations
ntggaatgaatttgttttctagcaaaacaaattattatacctatagttcataaggctaaatggaccaatctaagttttgtgcttttatttgttttttgcttagctagtctcttcttaagtaatctcccttgtttttcttgaacaataggtggcagaacgtaacaatgatcctcaattggcagacttcattgagagcgagttcttgtatgagcaggtaaaacttgcagttgaattcatagtatggttggatttcataagatataagactccttgaccattgtatgtaatacaatactctgaactctttacgtcctanaataattgttgtcttttacacggatcaagaaaataataataaataaatgaatgaaatagtaattntacacaagtaaccttacattatcattaatttatttctaaattctataattggttctcaat

SEQ ID NO: 16953 - DNA, 393 bp, Glycine max
agcttataaggtgttgtccaatcgggtgcctggatgatgggggtggtagtcaacgctcttttgaggcaatcaaaagcctctttgcatctgtcattaaagtcaaactccacctccttttgcaacaagttggacagtggaagggctacttttctaaaatcccttataaagcgcctgtagaattctgcatgaccaagaaaagatcacacctctcgcacacaagaggggtaaggcaattgtgaaataacagaaatttttgcaggatctacttcaatacccttattggaaataatgtggcctaaaactataccttgctcaaccataaaatgacatttttcaaaatttagaacaaggttagtttcaatgcatctattcaaaactttttccaaactattc

SEQ ID NO: 16954 - DNA, 382 bp, Glycine max
agctttttagtttccaagtgccaattcgtcctcttctttagtccagtcttcttctggcttcaattcatcagcgggctttccttctgtgtccagcatcttgggatgttcccagcctttgatgacagctttccaggttctgctatccagtgatttgaggaaggccaccattcttgctttccagtattcatagttgcttccatcaagaattggtggactgttcactggtcctccttctttctccatgttcatcagaatttatctccccacatctcactctgtgattgcgagtgttggctctgataccaattgaaattctgataccatgggacagatgtcgtacaggatgtcacgacatcacgcttcagaacatgcagcatatgtg

SEQ ID NO: 16955 - DNA, 445 bp, Glycine max
tgatctgctatagggttaccatcagattcggatgcattatgctgatatccccaagattgctttcagaacccaccacgtccattacgagtttaacgtattgttgtttgggttgtgcaacgcaccgtcgtccttccaagccaccatgaacctgctttttcgatcgtatctccgccacttcatcatcgtcttcttcgacgatatcctcatatacagttcttctttcgaggctcacctgagccatttggaaactgcttttcaggtgctgcttgacaatcattctgttttgaaattgtctaaatgtttctttgtgcagcctcaggtggagtaccttggacacatggtttcttgacgaggagtggaacctgtggcttctaaagtcgcagccattcatcaatggcatgttcctcattccatcaaagtcgttcgcatctttctaggcctcgca

SEQ ID NO: 16956 - DNA, 389 bp, Glycine max
agcttcttagtttcagatgatgcagatgggtttgtagctacctcatgcactcctctaatgactatggcatcatttctggcgctaaactgctaggagttggaagccatcttctctattaaatttctggcttcagcaggagtcatgtctccaagggctccatcactggtagaatctatcatacttctctccatattactgagtccttcataaaaatattggagaagaagctgttctgaaatctgatggtgggggcaactggcacatagtttcttaaatctctcccagtactcatacaggctctctccactgagttgtctaatacctgagatatatttcctaatggttgtggtcctggaagcacggataatgttttctaagaatactctctt

SEQ ID NO: 16957 - DNA, 438 bp, Glycine max
tcaagaataatgacatcatccaattatttatttcccgaagggaattctataaataggcctcctatttttaatggcgtgggttaccattattggaaaacccgcatgcaaatttttatagaggtaatagatctgaatatctgggaagcaatagaaattgggccctacattcccactatggtggcaggaaatacaaccatagaaaaacctagggaagaatcgagtgaggaagaaaagagattagttcattacaatttaaaagccaaaaatataattacatctgctttaggaatggatgagtactttagggtatcaaattgtaaaagtgcaaaagatatgtgggataccctacaattaacacatgaaggtacaacagatgtaaaaagatctaggataaatacattgactcgtgaatatgaattatttagaatgaatccaaat

SEQ ID NO: 16958 - DNA, 445 bp, Glycine max
  unsure at all n locations
tgcatgtccaagtttcttgtgccatacccagggatttcctttgatagataatagacatgttacatcttgatttgatagttcactaggattaatcttataaagttttcttttcctcttagcagtaaaaatttgggtcccattttcgtgttggatgacacacccacctttgctgaaggaaacatcaagtccaatctcacataattgacttatgctaagcagattgtatttaagtcctttaacaaatagtacattctcaatgggaggatagggatcaatacttatctttcctactctttctatcttccctccgaaaatgattgctccaccatgcatgagggtcagacattggaatatacatttttctcatgtcatgtgatgtgagcagccactgtccaggttccatgattggtgtgtttntgttgtggttgaatatatccgcaacaag

SEQ ID NO: 16959 - DNA, 392 bp, Glycine max
agctttattctatctgcaatgtttaacaacttaaaggaccaatgtctgattctccccactatcttctccacaagaggcaggtaatgatggacattgagtttcttgcaagacaaaggaacccccaaatatcggacaggcagagatccctcttcaaaccttgtgatcttctttataactcgaatgatgtcacaattcaagccaccacaaaacaccttacactttgttggattaatctgtagtcctgtagacttacaaaagaaactgaaagcctttagaatcatctctatagacttctcatcacctctacaaagaagaagaacatcatctgcaaagggcaaatgagtaatcctcaatcgctcacattggctgtgattattaaagttaggatctct

SEQ ID NO: 16960 - DNA, 446 bp, Glycine max
  unsure at all n locations
ctcagctatgctgcnacattataatagaccccctcagaagcatttccaacaacagcagaataattatgatctttcaagcaacagatacaatccaggttggaggaatcatccaaatttgagatggacaagtcctccacaacaacaacagcctgtccctaccttccagaatgttgttggtccaagcaagccatatgttcctcctccaatgcaataacagtagcagaagtcacaacaaagacaacaagcaactgaggctcctcctcaaccttccttagaagagttagtgaggcaaataaccatccaaaatatgcaatttcaataagagacaagagcctccattcagagtctgacaaattagatggagcaaatggctactcagttaaaccaagctcagttccaaaattctgacaaattgccttcacagactgtgcaaaatccgaaaaatg

SEQ ID NO: 16961 - DNA, 365 bp, Glycine max
agctttatacctatgcttctccttcttctccttgaaaagggccaggagagacacaccagaaaccttcacgaccttgaacctgactccaggaatatcacccacggcatgaccttttcgtccaaatccagctatcatgacttcattctacaaccatcaaccacataacattaggataagcatatcagcaccaacataacagcaaaataaagtaaatatgattgatgaatcacttacattctcttcaatataatttaagcaaccgtcatttggcacaaatgcagcaatcttcttccatttttgatgagttgaccctggcacattttcaatggcagagttgggctgcttacctcataccactggcatag

SEQ ID NO: 16962 - DNA, 444 bp, Glycine max
  unsure at all n locations
tctggtgggacatcttgatgcaatcctccctaggaagggaccaatcactagaaccatgagcaagaggctccaagaagattgggctagagctgctgaagaaggccctagggttctcatgaaccttagggtagatttctgagcccatgggccaaggttgggtccaattatctttgtacatattagactaggatgtcattatatttggtccttgtatatagggctccatattgtaggtagggtaccctagaaatataggatttttcagcccttgtattttttgggcacctagactagtttttatattaggggtagttntgtaatttcacatgcactaagtggatatttgatgtgtgtggttggaaataaatttaattgaattggtagaagcccaatccaattaaatnttagagggggaggtgagcatttgcttactacaccccattg

SEQ ID NO: 16963 - DNA, 445 bp, Glycine max
  unsure at all n locations
tataacatgattntgtgttncacatcccctggagcatattttgacttatcattcaacaaagacaagggaccaccaacttacagaattcaaggtcaatcttgccatctaatagggagtttattaccaatgccaggaaaacctcctaaattttctcacttgtatatctatggtacagagaataaaatccaaaatagaattggaggcttaaggtaaactataattcttataacagatactaaagtcataataataaattgattgttcttaggttatattaacttacaagtttaataatgcagatttgggaaccaacttgatccaaagattgttgccaagttaaaagatatgttttaccatcataatgtctttgctaaatctttcggaatggcaaaggaaatatttgagaagataaaatcacatgatctgaaattgcaatagatatctc

SEQ ID NO: 16964 - DNA, 437 bp, Glycine max
  unsure at all n locations
tcacaaaagtttatatggcttgaaacaagcaccgttgctgtgatacaaaatgtncaatgagtttatgagcaactcaggattcaaaagatgtgacatggaccattgctgctatgttaagaaatatactaatagttatgttatcattgtcgtgtatgttgatgacatgttgattgcaggatctagtatgacagatattaacaagttgaagtagcagtgggcagaaaactttgaaatgaaggatcttggtccagctaaacaaatccttggtatgagaattcttagaaacagatcagaatgaatcttaaagctatctcaagagaaatatatacacanattgcttgacaggttctaccttggagattctaagaccaggaatacccctttgggatctcatttgaagttttcaaagaagcaatctttgcagacagatgaagaaa

SEQ ID NO: 16965 - DNA, 436 bp, Glycine max
ttcactcggatgtccgatgcacgcgcatcatatatcgagttgtctcgaaattgaacaacggaagctctcgagaaattgaaatgatcataacttttcactcagatgtccgattcagacgcataatatatcgagacgctcgaaattgaactacggaagctctcgagaaatttaaatgattatgaattctcactcggatgtccaattgaggaacatcagatatcgagacgctcgaaattgaacaacggaacctctcatgaaattcagatggtcataacttttcacacggagatccgattcaagcacatcacatatggagacgttcgatattgaaccacggaagatctcgagaaattcaaatggtcataacttttcactcggatgtccgattcacgcgcatgatatatcgagacgctcaaaattgtacaacggaagctct

SEQ ID NO: 16966 - DNA, 438 bp, Glycine max
ttaatgttgtgactaacaaggtgcataacagagaatgggatttggtaaagtttacacacaacatatatgtatcttctattttaatttcagaaataacctttgattgtggagcagttatacttggctaatcaagagaaattccacaaagtggctgacaaaaattactggaaagctattggggagatcattcctcgagaggttcccaacattgagaagaaaagaagcaaagtggatcacgagaataagccatcaatcacagtcgtccaaggcccatagcctggctaacccacagatctttctaggatgaggcagatattgttgaagctgaaacatacaccaccagctcacatgattccccctcctactgcacctgctaaagacgccatagatgggaacgatggaaaagacggaatagaaacagcatctaaagccaatgga

SEQ ID NO: 16967 - DNA, 389 bp, Glycine max
agcttatgcttttctttatattgtcacacagatttcatattcttaatggctgctgttttttcagacacttcctatttttcttgatggccttgttactgcatggggcgctatcctaatttctgtgacattaattcttttgtttggtgaggtgagaaagttctgtccttatatgattttaagtataatacattcatgtcacagattaagtgcttgtgttgattgtttagaggttggaacctggaacaaaaatctggtggcacagcacccgttttgtttggttcacgttttttccatttgtgaaagacattttttgttaattagaatcaattccagttgaagtgggaaccactagcttctcattcctctaatgttatgtttggcaataaaaa

SEQ ID NO: 16968 - DNA, 444 bp, Glycine max
tccccatcttcccagcaccaaccaccaacactccagaatctgcaaatgaggaatccggtagcttcatcagtgcaagctccacagcagccgagcttacagaaactgatccagatgaaatgttagtctcggttctaacccgcttcccaaccgatatcgcctgcttgaacaaaccactgattttcttatcaaaaccaggcactccctgtccagctttcacaacctgcttcacctgagcaagaatttgaccttccccaagaacaagtgagtcaagccctgacgccacttcaaatagatgctgcgcggcgtacgcgttatacagcaaaacttggtgctcccgaagctcaggtattgaaatccactcacctaaacaaaaaacacaaccatgagttttcctttccaaacaaaaacaagaacttagcatgggtaaatcacctatttcgtcca

SEQ ID NO: 16969 - DNA, 416 bp, Glycine max
tgtcaaatggaaggataggataccctatgctttctggaatttcaacccaacagtgtctattattaggagagaactctgcaagtgcaacaccacagaaaaacatgattggaatgcaagaatatatgacatagtaaatatataatctaaaaatttacttttgttataggttaatgcattaattatctcaagattaaattaacacattttttctctctctcttttcaacaatggttgcgagagagagcaagtaattttgagaactcaaaacttgaaaatgaatgtacctttaggtaaagttttgaagcatattatatgattgtgatttttttaaataattattatagaaggggttagtttacttttttgaatctgtcacatataaacttttttagattgtacttactaaattttgaaac

SEQ ID NO: 16970 - DNA, 392 bp, Glycine max
agcttgacaggttcatgtgcaggtgcaggtgctgctgctagtggaggcacttcaatttgcttgccagacctcatggtgatggcactcacatttttcgaatttttcacagtctgtgaaggcaatttgtcagaattttaggactgagcttggttcaactgagtagccatctgccccatttgatttatcagactctgaatggaggctcttgtctcttgctaaaattgcatattctggatggttatttgcctcactagctcttctaaggaaggttgcgaaggggccttagttgcttgttgtctttgttgttgttgttgttgttgctgcattggaggaggaacatatggcttgcttggaccaacaccattctggaaagcatggcatgctgttgttgt

SEQ ID NO: 16971 - DNA, 432 bp, Glycine max
  unsure at all n locations
ngaaggacatgcacaaagtgtgactatatgatgtggtaatatggtgtagcaagcaaatgctcacctccccctctaaaatttaattggattgagcttctcccaattcaattaaatttattttccaacacacacatcaaatattaacttaatgcatatgaaattacaaaactacccctaatctaaaaactagtctaggtgccccaaaatacaagggctgaaaaatcatacatttgtagggtaccctacctacgttatggagccctaaataaaaggcccaaaaataatgaaaccttaatctaatatgtactaaaataagtgggctcacacttagcccatgggcctaaaatctatcctaaggttcatgagaaccctanggtcttctcttgcatctctagcccaatctacttggagtcttctatccaatgcccttgc

SEQ ID NO: 16972 - DNA, 438 bp, Glycine max
  unsure at all n locations
ntgagggaacccgccattnttcataatagaacactggtaatgtgtctactatcattgttatcatttctttctccgtctttgagggaaccacttgggctgccagatctctccacctttgggtgtattctttgaaagattcatgccccctttttgcacatgttctatagttgcatcctatccggagccatatcagaattgtactaatactgcctaacgaaggcaaccattaggtcctttcaagaatggactcgggaaggttccaagttagtgtaccaggtaacaactacgctagtaagacttttttggaagaaatgtatcagtagttcctcatcttttgcgtatgcccccatcttctgacaatacatctttagatggttcttgcggcaagtagtccccttttactctctggtaatcgattaccatattgttgtcatcgat

SEQ ID NO: 16973 - DNA, 433 bp, Glycine max
  unsure at all n locations
tagcaaagaaaaagcaattganaaagtgaaactctgtcttgtttatcgcttggaagtttatttttcaaataattgatataaaagtcaatgatagtatcattaaggcatttctcacgctgtaaaagctcaatatcgctctttttgatacaaacagcatcagggtccccctttggatacgcctttttaaatgcagcagaatcatgctccactatctggtctcccaagttaatttcatcttctgagggattgaagttgaagtagaaatcaaagaaaatgttagacttgatttttttttttttttatgagggaagaaagaaataaaatataagtaactactgtctaacataagtaacactgcacctaaagaatcttgaatctagacatcttgttataaaattacttttaaataagataatatgaatgctattttttt

SEQ ID NO: 16974 - DNA, 432 bp, Glycine max
  unsure at all n locations
tatgctgcanatatttacaatagacctcctcaacctcagctgcaaaatcaaccacagtagaacaattatgacctctccagcaacagatacaaccctggatggaggaatcaccctatcctcagatggtccagcccttagcaacaacaacagcagcctgctccttccttccaaaatgctgctggcccaagcagaccatacattcctccactaatccaacaacagcaacaaccccagaaacagccaacagttgaggcccctccacaaccttcccttgaagaacttgtgaggcaaatgactatgcagaacatgcagtttcagcaagagaccagagcctccattcagagcttaaccaatcagataggaccattggctacccaattgaatcaacaacaatacctgaattctgacaagctgccttctcaagctgtccaa

SEQ ID NO: 16975 - DNA, 390 bp, Glycine max
agcttctagattagtgtactaaacaaccgcggctccggccaagctatcttggaaaaagtgtattaatagtttctcatccctagagtgcgcgcccatcttgcgacaatacatcttgagatggttcttgggacaagtcgtccctttatacttgtcgaagtccggcaccttgaattttggggggataacaacatctgataccaagcaaagatccgcgaatggatattcaccaaagccttcaacagccctcaatctctcctcgaggagatcgagtttccatctttcttcgatcgtcgggggtggtccttctgtggacaagattattggttgtgctgtgaagttgggatgatgcaaagtgttgcgtgccggcccctcgacgaggatcggtgggta

SEQ ID NO: 16976 - DNA, 446 bp, Glycine max
  unsure at all n locations
tgaagganaactggatgcgttggtcaacttggtaacctagctggccttgaatcagaaatctgtacctgtcgcaagggtttgtggtctgtgctcctctgctgaccaccatatagacctttgcccttccatgcagcaacctggagcaattgagcagcctgaagcttatgctgcaaatatttacaatagacctcctcaacctcagcagcaaaatcaaccacagcagagcaattatgacctttccagcaacagatacaaccctggatggaggaatcaccctaacctcagatggtccagccctcagcaacaacaacagcagcctgctccttccttccaaaatgctgctggcccaagcagaccatacattcctccaccaatccaacaacaacaacaaccccagaaacaaccaacagttgaggcccctccacaaccttccctcgaagaacttg

SEQ ID NO: 16977 - DNA, 435 bp, Glycine max
  unsure at all n locations
tcagcccaagcctcttgaaatgcctgcattgcatttcaatgtatatacagatgcttctattacagtaccaacttggcaacttccacaaaaaataataagtataataaaaaaatacaataccaagtaccaacttaagataacaatttaattagaattatttactgtcattcaattacaagttgctatgtgtagtaaatttatcatttttttattcaaatttatcaatttttatcataattactataaaagttatatttatgatgatttctaattgattgatattataaattttttaacacttaaatgtgtgtgcatataatgtattgaatttaaaaacataatttatttgcatatttaatagcttcacaattaaaatacgttntctatacgttaaaaagatactatattaaatactaggtggtgctgagatcactg

SEQ ID NO: 16978 - DNA, 388 bp, Glycine max
agcttattctccttcaactgcacaaggctcttaatatttgaagagtatccttgtggaaccttcacccgacgaagacactgacaaaaacttatcttctccttcttggacaaagtatggcaggctgggggcaagtaaattttcttcccatcagaccttggatgcaactgtgatcgtatacccatatcagctagatcttgacgagtattcaagccatccttcatcttgccttgaatgttaaggagcgtcccaatcacactgtcacaaacatttctccacatgcatgacatcaatacaatgtctaacgtcaagatcacaccagtacggaagatcaaagataattgacctcttcttccatatgcaactctgactattatccttcttttgggtc

SEQ ID NO: 16979 - DNA, 439 bp, Glycine max
  unsure at all n locations
nttgttgagaaacaaagtggcaaacttataaaagtcttgataagtgacaagggaaaagaagtgagttttgagaggcagttgactgttggctatacacctcaacaaaatggtgtatctgaaaggaacaatcaaaccgtgatggagaaaggaataccaaaagaattatggcctgaggctattaatacaaccgtgtacttgttgaataggtgcccaacaaaagcagtatgaaatatgacaccatttgaagcatgaaatggaagaaagcctttagtgaaccacataaaattttttggatgtgttttgctacgctcaagttcctaaagaaaagattacaaagcttgaagaagcaagtgagagatgcatctttattggctatagttccgtgtcaaagggctatagactctacaacttgaagaccaagaaagtgatcattagccga

SEQ ID NO: 16980 - DNA, 415 bp, Glycine max
gatctggttgaaatatcttgctagaaggtgtttctattatgcttgtattccaagcattcctgacatacttcacttggcacttgaatgtgtggcaaccagtgcaccatattatccctatgtacgaagtgtggatcctgaaattgagatgcccaaacttataatgccaaagccacttacttttgctcactgttgtggctagacattcatgtcccataccattaattcctaccttaaaggatgtgttctttgacataagatcctttaaaactagtcttttcttgttgtcatacaccattagcacattatcctccattttcatcacaaatcctttctccaggaattgaccaaggcttaagagattattcttcatttcgggcacaaaaagcacaccagatatgaaagattgtttaccatc

SEQ ID NO: 16981 - DNA, 375 bp, Glycine max
tgttgcaagcttgttcaacctatcaagagtcacattctaacaacaattgttccagcttggagaattcatcaatggatggatacatggagctataagaacaattgataactgtttaatatgagttattttgataataagaatatattgaaaatatttttaaaaatatttatttaacagttattcttggcttaaatattaagatttgatatctttcttatttatgacgttgccatatgaaaaggagagattaaaagagataaagatcgaaaaaatatccaagatatcaggaaatcattactagctaaacaaatcctaaagatatcacaaatatcaataatgaagatttttaacatcacgcccaagtcactacaacaa

SEQ ID NO: 16982 - DNA, 401 bp, Glycine max
  unsure at all n locations
agcttgttacaagattctccttgcctggcacttcaaaaccttctggttgggtcatatagatgtcttcctctaaatccccatgcaagaatgcagttntaacatctaactgctccaagtgaagattctctgcagctactatgctcagaataactctgatggtagtcatctttacaactggagagaagatctctgtgaaatcaattccttgtttctgctgaaaccctntcaccacaagtctcgccttgtatcttcttctaccgtcagattcttcctttagcctatagacccacctattctgtaatgccttctttccttctggcaatntagttaaagaccacgtcttattcttttgaagggatgtcatctcatctttcatcgctagctcccactcaatagtgtca

SEQ ID NO: 16983 - DNA, 373 bp, Glycine max
  unsure at all n locations
tgaaggacatgcacaaagtatgactatatgatgtgtcaatggngtgtagcaagcaaatgctcacctccccctctaaaatttaattggattgggattctcccaattcaattaaatctattttccaacacacacatganatattcactcaattcatgtgaaattacaaaactacccctaatacaaaaactagtctaggtgccctaaaatacaagggctaaaaaaatcctacatttctagggtaccttctctatattatggagccctaaatacaaggccgaanaataatgaaaccttaatctaatatgtacaaagataagtgggctcatacttagcccatgggcccgaaatctaccctaaggctcgtgagaaccct

SEQ ID NO: 16984 - DNA, 342 bp, Glycine max
  unsure at all n locations
gtgagcaaattcaaacgacaataaccttnttctggatgtctgatngagncccgtaatatatcgagacgctcaaaattgaatgttgaacctctgatgcaattcaaaggacaataactttttactcggatgtctgattgagtcccgtaatatatcgagacgctcgaaaatgaatgttgaacctatgagccaattcaaacgaccataactttttactccgatgtctgattgagtcccataatatatcgagaggctcgaaattgaatggtcaacctcttagccaattcaaacgacaataacttgttactcggatgtatgattgagtcccgtaacatatcgagacgc

SEQ ID NO: 16985 - DNA, 454 bp, Glycine max
  unsure at all n locations
tagcccatcatcaatattgatttcaagaaacaaanaagcaagtatatatatcagtgaactgagccagaccaaggaaaaatacatcaaagaaaataaataatctagtatagctaattttataatcagataaagcatctaagacctgctgccatgtggtatcaacaagaggcagccgccgagcattgccagcatcaaaatccagtacaccataatccctcaaccgaatctacacagcaataactaaaataagaagtcttttgagaattaaatgcatggcattatctataagacacattgttcaaaatgagacaaacccaaaggaaggcacggattctttgcaaattcccaacaccaacaccaagagcagcctaccattagataaaaaagcaagcagaaattaagtgttgataacaaaaacaaattcatgcttgctctcttatatngaatatgaaac

SEQ ID NO: 16986 - DNA, 350 bp, Glycine max
  unsure at all n locations
agcttctactgtgaagctatcttcgtatcgagcatggccaaatatgcatgacagtcggtttgcgctttacaagttgccattgcgggttcccaaagatgaccaagaatatgctggtttatggggaagaacttttggttggcctcctggaaagccttctgaagacaagcctggaaaggctttattctttcttctgctctcttatgaggagttccagggacaacagcttctcattgcaaccaaaattttggaaggcacacactatgtgttacatcctaacggttcancaattgttacagcaaatatcaatgatccttcatcccaacccttttcctgggacactgatgcagact

SEQ ID NO: 16987 - DNA, 406 bp, Glycine max
  unsure at all n locations
agcttatgctccttcaattgcacaatgctcttaatatttgaagagtatccttatggaaacttcacccgatgaagacactaacaaaaatttatcttctcctttntggacaaagtatgacaagttgggggcaagtaaattttcttcccatcagaccttggatgcaactgtgatcatatccccatctcagctagatcttgatgggtattcaagccatccttcgtcttgccttgaatgttaaagagagtcccaatcacattgtcacatacattgttctccacatgcataacattaatacaatgtctaacgtctagatcaaaccagtacggaagatacaagagaatggacctcttcttccatatgcaagtcttaactttatcctttctttgggtctttccaaatacagtat

SEQ ID NO: 16988 - DNA, 357 bp, Glycine max
ggtttgcaagcttgttcttcattctctacgccgacgccactggtattcaaatgcatatctgcaatatctgcctgcttccacactttaactaatgtgtactttgataattggatttttgcattgcttgttttttccctttcattgcaggtatatccagagcacatgtgccacctctggggaaggactatatgaagggctggactggctctccaacaatatagctaacaaggtatgccttgaaaatctgcatcttttgtgttcgttgcttgacctgtgatactctgatttctggttacttttctggatcacgcctaagggacattttgtggaatgccgctatcttcttgcttgctttac

SEQ ID NO: 16989 - DNA, 455 bp, Glycine max
  unsure at all n locations
tccttcactcttccagcacgaccaaacaaatccaccacgctgccatatatctctatatctggtgttatattataataactggtcattaatctaaaatatctcagcccttcgtccactagaccagcatggctacaagcacttagaactgccataaacaccatcttatctggtttaatatgatgagaatcatgaaacaggccaaatacagtctaaaggcccaagtggagaaggacgaaggcccaagtggagaaggacaaagcccccgagtggagaatgatgaaggcccaagtggagaaggatgaaggcccagaggcagagacactatcaagactattaattgttgctgaaggcccaaactaatttgaaggcccaagttaaataagtttctagttataatttatttttattggaattttggcccanactgtctagaaagcccatgtctatttttatct

SEQ ID NO: 16990 - DNA, 429 bp, Glycine max
  unsure at all n locations
ntactcatgaccaccaatggtctatatatatgtgacttattcacgaaattactcagagattntcagaacaacaaagtgtttatcctctcaaagagcaaattcattttatcctcttaagaattccttggccaattcaattgcaattcattaaggaattatttgagtgctcaatctgtaaaatccatctctttctagagagatttgttcttcttcttcttctcattttctaagggattaagagactgtgagtctcttgttgtaaaggatctctaaacacaaaggaaggattgtccttgtgtgtttagaacttgtaaaaggaatttacaagatagtggaactctcaagcgggttgcttgnggactggacgtatgcacaagggtgtggtcgaaccagtataaaactgagtttgcattctctcttcccttaatc

SEQ ID NO: 16991 - DNA, 435 bp, Glycine max
  unsure at all n locations
tctagaattgcatgtaaaaaatatatggcataatttgctgtaaaggaagctttccactcaagagtgtaagtacatccattccatgttcttaggatcaacaaaatgctttaatgtgctagagctgatagtgtttagtctggaatcagaggtgcatctagaaagtcacagggaacatgtgctagagtcaccattggtcaggttctttntcttatgtgttgtaaggagaacaacaatcatcatgcacaaaaggctctttgtggtgctaagtttaagttccctagtcgtcagaagatcatagttagctggtgtcagaccctaatttcatatgggggcaatcatttgcaaacatttggattctttctagccgaattgagctgcttaacacttgattttgcaatcatttcaccttngaagtcatgattttgcacactttga

SEQ ID NO: 16992 - DNA, 395 bp, Glycine max
  unsure at all n locations
agctntactaatagaatcatcttgatatgactgttttggaagtcctcttacgaggctatgcttttgaagctttgagattaacctccagctagcatggtcaaacttcttattccatacncagtaatgctctttgactaaaagtaagcatgacaccttttgattggatagatcaccaagtttaatcttatagtgatttccttgtctcttagtagacaagagtaaagagttgtcctttgtttggatgatacacatatccttgttaaagttaaaggtgacattgtatccactatcatacaattgacttatgctcaacaaattatgcttcaatcctttaacaagtaaaacattattgatagaaggataataaggaatacaaaccttacctacacctatta

SEQ ID NO: 16993 - DNA, 462 bp, Glycine max
tatgctgcaaacatctacaatagacctcctcaacctcagcagcaaaatcagccacaacagaataactatgacctctccagcaacaggtacaatcccggatggaggaatcatcccaaccttatttggtcgaatccttcacaacaacagcaacaacaacaaccttactttcaaaatgctgttggcccaagcagaccatacgttcctccaccaatctagcaacaacagcaacaacagaaacaacaaacagttaaggcccctccgcaaccttcgcttgaagaacttgtgaggcaaatgactatgcaaaacatgcagtttcagcaagatatcaaagcctccattcagagcttaactaatcagatgggacagttggctacacagttaaatcaacaacagtcccagaattctgatagattaccttctcaatctgtccagaatcacaaaaatgtgagtgccattacattg

SEQ ID NO: 16994 - DNA, 417 bp, Glycine max
  unsure at all n locations
agcttcttatccaaggctcatcttggtggtgaagctccttcttccatggcttattccctaatggatggcgcctcctctcacctcttctcctttgtcttccgctgcatctccatggtggaaaatcactattaaaggacctcattgaagctcanagatccaacctccatagaaaccccacaagcaagcttccatcataaccactctatttcccctaccagggatatccaacttggtcactgcactccccatgtacatacacaacatacatcatcacaatgacattatcaacatcaacaacatctcatctcaatgtcattatcatcatcaacatgatcccatctcaatgtcattctcaacatcaacatcatctcatctcaatgacattatcaacatcaacatcatctgatttcaatgacg

SEQ ID NO: 16995 - DNA, 389 bp, Glycine max
  unsure at all n locations
tagctttcgtncctgagttntccgactatgctcttgtgtggtggaacaagctacaaaatgagagagcaagatatgaagagccaatggttgatacatggacggagatgaaaaagatcatgaggaagcggtatgtgccggctagttactcaagggacttgaaattcaagctccaaaaactaacccatagcaacaagggggttgaagagtatttcaaggaaatggatgtgctcatgattcacgctaatattgaagaagatgatgaggtaactatggctcgcattcttaatggcttgactaatgatatccatgatattgttgagctgcangagtttgttgaaatggatgatttgcttcacaagatgtccgatccactagcataatataacgag

SEQ ID NO: 16996 - DNA, 419 bp, Glycine max
  unsure at all n locations
ntcatagttcaattccgagcgtctcaatatattatgcgcttgaatcggacctccgagttacaagttatgaccatttgaatntctcgagagcttccgtatttcaatnttgagcgtctctatatgtgatgtgcctaaatcggacatccgagttaaaagttatgtccatttgaatttctcgagagcttccgttgttcaatttcgagcgtctctatatgtgatgcgcctaaatcggacatccaagttaaaagttatgaccatttgaatttctcgagagcttccgttgttcaatttcgagcgtctcgatatattatgcgcctgaatcggacctccgattgaaaagttatgagcatttgagttgctcaagagccttcatatggtcaattctagcgtctcgatatattatgcgcctgaatcggacc

SEQ ID NO: 16997 - DNA, 318 bp, Glycine max
  unsure at all n locations
agcttangctattggagggagaataaaacaatccaaaatcaatcgtacctttcaagtnacgcaaaattctttttgcggcttttagatgacgagaggtcagagcctccataaagcgacacacaatctcccaccgtattatagaatatcgggccttgtattggttagataccttaaactccccacaagactcttgaagatcatggagtctaccttctctccttcatcagactttgataacttcaagccaccttccataggtgtgttcacgggattgcactcaagcatattaaatgtcttcaacacttcttgtgtgtacct

SEQ ID NO: 16998 - DNA, 455 bp, Glycine max
  unsure at all n locations
tgcagagctcaataattgattggatagagaatcaaacttttatttatctgttagatgacattctgtttactcatgatcaaattaatttaattgttgaaatattttataatttacaacaataagtatcttaacattttcagacaccaaatttgatattatatattaaggttagttcaaaattgtagaaacttcagcaaaattttgaattaatattctcccatttcatgtttatccacatagtttctaactaataataagcttaataacatatgcataaatgttgaacaattaaaatgctaaaaataacatgatttatgtttttaatatcaatggctnggagttcttgatttctaacaacgaatagagaatagcactacagcaagcacactgaaggaagagtattcataaggtgcaacatcagtataaaatgggatagaagtgataaaccaccatca

SEQ ID NO: 16999 - DNA, 378 bp, Glycine max
  unsure at all n locations
agcttgtatgatngatggctgaggggaagcgggcgcaagatntcgtgtgtgggttggcgccgaggattaagagggttgcagagcgcgctgatgagcgagcgcgtaagatgaagaagcatcatggcgttaagttcagttggattttcaataaagaattgcttttgtgaaatttcagttaagacttaagagataagagatagaggtcaacgtgagtcaacaggtttttggctttgtgactattttgagtcttgtttgtacgtggcattntgagtacgaataatgaacaatntaacatggattgcgtgtaatggacattgttggatccatggttgttgttctggtggatacaaaaccagtaggaactttttgttgaacgtt

SEQ ID NO: 17000 - DNA, 443 bp, Glycine max
  unsure at all n locations
taagctccttcaactgcacaaggctcttaatatcttaagagtatccttgctgaaccttcacccgacgaagacactgacanaaacttatcttctccttcttggacaaagtatggcatgctgggggcaagtaaattttcttcccatcagaccttggatgcaactgtgatcgtatacccatatcagctagatcttgacgggtattcaagccatccttcgtcttgccttgaatgttaaggagcgtcccaatcacactgtcacaaacatttttctccacatgcataacatcaatacaatgtctaacgtcaatatcacaccagtacggaagatcaaagaaaatggatcttttcttcatatgcaactctgacttttatccttcttttgggtcttcccaaatatagtattcatgtgttgaacccgctcatataccttctcaccagtcaatg

SEQ ID NO: 17001 - DNA, 345 bp, Glycine max
  unsure at all n locations
agcttttacacctttaatcaagcttagttcaactgcaaccatcagaacgaaaccctattctattacccggattatcatacacaatctcaaaggttttttgttggacgttcccaaatatggttatttgactatcatctttattgtgaataaatgccaaacaagactgtttatcatcgaactcatagagtacccctggcgggtgtaagtccactgtgacgccaggaaagacgaatgacatttcaggaatnggataatgatatccagtaagatcataacacgtgtcaaatacattgtgcgaggnggcagtgggatagttggacaaacgctgctgaaatactgaacgga

SEQ ID NO: 17002 - DNA, 399 bp, Glycine max
  unsure at all n locations
agcttcttatccaaagctcatcttggtggtgaagctccttcttccatggcttattccctaatggatggcgcctcctctcacctcttctcctttgtcttccgctgcatctccatggtggaaaatcactattaaaggacctcattgaagctcanagatccaacctccatagaaaccccacaagcaagctttcatcataaccactctatttcccctaccagagatatccaacttggtcactgcacttcccatgtacatacacaacatacatcatcacaatgacattatcaacatcaacaacatctcatctcaatgtcattatcatcatcaacatgatcccatctcaatgtcattctcaacatcaacatcatctcatctcaatgacattatcaacatcaacat

SEQ ID NO: 17003 - DNA, 435 bp, Glycine max
  unsure at all n locations
tctanactntgtacaagaatgaagctctgataccacttgttagtctagtggcctcagatatcttaagaagggggggttgaattaagatattccaaacttttctcctaattaaaaatctatcttactttttacttaagttatgaattcccttaatgacaatcttcttaaatattaattcaaatgaagcaacttgaattatgaatataaagcaataataaataaaggagattaagggaagagaaaatgcaaactcagttttatactggttcggccacacccttgtgcctacgtccagtccccaagcaacccgcttgagagttccactaacttgtaaattccttttacaagttctaaacacacaangacaacccttcctttgtgtttagagattctntacaacaagagactcacagtctcttaatcccttagagaatg

SEQ ID NO: 17004 - DNA, 368 bp, Glycine max
agcttttacaagctggaatcattcatcctatctctgacagccaatgggtgagtcctgttcaagtagtcccgaagaaaaccagcctaaccgtgataaaaaattacaatgaggagttgattcctactcgggtgcagaacagttggagagtctgcatcgactatatgaggctgaaccaaggtaccaactataacgcctggcaagtaaatctcactactatttccttgatggcttatctggttatatgcaaatcactattgctcatgaggataaagaaaataccacattcacctgccccttcggcactctttcctatatgatgatgcctttcagcctgtgcaatgcccttattaccttctaactgtgcatga

SEQ ID NO: 17005 - DNA, 350 bp, Glycine max
agcttcttcatcagaccacttccagtgtgctggaactacttcacatggacttgatggggcctatgcaagttgaaagccttggaggaaagaggtatgcctatgttgctgtggatgatttctccagatttacctgggtcaactttatcagagaaaaatcagacacctttgaagtattcaaggagttgagtctaagacttctaagagaaaaagactgtgtcctcaagagaatcaggagtgaccatggcagatagtttgaaaacagcaggtttactgaattctgcacatctgaaggcatcactcatgagttctctgcagccattacaccacaacagaatggcatagttgagagg

SEQ ID NO: 17006 - DNA, 387 bp, Glycine max
tgttgcacatagttatcaaagtgcgtgatgagtgtttcatattgagcttgagttctgttgtagcctgcattgccaatgtgatctgatttcttcccgtattgattgtgaacaacgagtaatgcagatgcatggccggcgagttcggtcaaatggagcacgtaaatgcatattggagagttctttgttgggttagaggcgtcaaggaggttaatcattggtggcacatttctagggctgtggatgcacaccatgactctgaactctgtgtctgtttgagacatttgaatatctcttcttttgtaagggatgatcccctttgatgtttagtatatagctgatatcccatgtacagttataccatcattagaatgttataatcaccattga

SEQ ID NO: 17007 - DNA, 434 bp, Glycine max
  unsure at all n locations
ntctattctaattntgaaatccatgaaggtaccctaatgtctgaagtttatgggattaagatggtcattgaccaatccctattttttgacttaacaaaattgcctagtgaaggtgtaccttttgagggtgcactgattgatgaatggaaatttgatttctctatgcatgatgtatgccaattggtttgcaccaaccaagcggatatgaccggaaggcttcttgccggttcattggcttttgaaagtcgcatcctccattatcttatagttcgcattttgcttcctagatcttcaaaccttgcctaggtttctgaagaagacctcattgtcatgtgggcctttcataaaggtctacaaattgattgggcacatcttgttagatatcgcatgcataaggcatcgcgattgaatgccccattaccttatcctcatct

SEQ ID NO: 17008 - DNA, 456 bp, Glycine max
  unsure at all n locations
tcaagaaaaagatggcctcagcaaattccttatttccagattggtattctatcaatagacctccaatctttaatggagagggttaccactactggaaaacccgaatgcaaatttttatcgaggcaatagatctaaatatctgggaagccattgaaatagggccttatatacccaccacagtagaaagagtttcaatagatggtagttcatcaagtgaaagcataaccatagaaaaacctagagatagatggtctgaagaggatagaaaacgagtacaatacaacctanaagccaaaaacataataacatctgccctaggaatggatgaatatttcagagtttcaaattgcaagagtgctaaggaaatgtgggacactcttcgattaacacatgaaggaactacagatgttaaaagatctaggataaatgcactaactcatgagtatgaattattta

SEQ ID NO: 17009 - DNA, 402 bp, Glycine max
  unsure at all n locations
agcttcctcgtggcttctttgagaagctttctcaagaggcttctttgagaagctagatccttatctatccacacccctctattaactaaattaacttccttaaaaataattacggatgaaaataacgcaacaaatattcaaacatcaaacataattactaatagtatatagatatatatatatcagggtgttacaactctcccacccttttagaaatttcgtcctcgaaatttaccttactcaaacaaggatgggtgagcttctcacatctgactntctaattcccatgtggcatcttctcctgatgcacctccccagatcaccttgaccaacagaatctctttccctcttaagtgttttggttgcctatcctcgatcctcanatgcaatgtttcatatgtc

SEQ ID NO: 17010 - DNA, 345 bp, Glycine max
  unsure at all n locations
agctttactaatggatagtaagaaccataaatacctagccccaccagtaggttacaaaatatttataaagtataaaccgtacctatttaaagcctatgaagagagagagtcacacagttttcccatcacaaggtcatgttaaaactcaacatgaaaagatacattccctaagttgatttgtgctctcttttaaactgactactaaattgagagggacttttaaattactgaactattcttcaattaacattaataaaggatccttggttnctttgtagcagggtcctcttgctgctccggttcttcaacacctgacanaagcagatttaagcaagatgtactttg

SEQ ID NO: 17011 - DNA, 402 bp, Glycine max
  unsure at all n locations
agcttctaagcataatattgtttgacgacatcagagttcacgggtgaaggtagctcttcgccatccatgttggtaagcaccagggctcctccggagaaagccctcttcacaacaaaaggcccttcgtagttcggggcccatttccctcggtggtccttgacagcatgggacattttctttagcacaaggtctccctcatggaacttgcgcaagcgtactttcttgtcgaacgcgctcttcattctttgctggtacaagcgcccatgactcatggccgttaagcgcttaccctcaatgagggtgagctgatcgtagcgtgtttgagcccactctgattcctttaatccggattctgccaagatccttaatgacgggacttctacctcanatggtaacaccgcc

SEQ ID NO: 17012 - DNA, 390 bp, Glycine max
  unsure at all n locations
tataatatatcgatacgctcgaaattaaacatcgattactctcagganattcaaatagtcataacttttcacacggatgtccggttcgggcgcataatatgtcgagaagctcgaaattgaacaacggaagatcttgagaaattcaaatagtcataacttttcacacggatgtccgattcaagcttataatatatcgatacgctcgaaattaaacatcggaaactctcgcgaaattcaaatggtcataacttttcacacggatatccgattcgggctcataatatgtccagaagctcgaaattgaactacggaagttcttgagaaattcaagtggtcttaacttttcacacggatgtccgattcaggcacatcacatatcgagacgctcaa

SEQ ID NO: 17013 - DNA, 366 bp, Glycine max
agcttgtgagttacaaagtcttgaataagcaattatgtgagtatttagtattcttgaataagcaaattatgtgagtggtcactctattctaatataaataggggatcatactcttgtatttggtgtgccaaatgaaataaaatctttttcttcttccaacacagtggtatcagagcttgagttctagagtgttgagaaagaaacactttgtgagttgagagagacatactctgtgagttgagagatggcaagcaatggcttaagtatgtttcaattccctcgtcttaccaaagagaattatgataattggtgtcgtcgcatgacagccttgttaggttctcaagatgcatgggagattgtagagaa

SEQ ID NO: 17014 - DNA, 456 bp, Glycine max
  unsure at all n locations
atactaagcttcactcgatgtccgattcaggcgcatcatatatcgagattctcgatattgaacaacggaagctctcgagaaattgaaatgatcataacttttcactcagatttacgattcagacgcataatatatcgagacgctcgaaattgaactacggaagctctcgagaaatttaaatgatgataaattctcactcggatgtccaattgaggaacatcagatatcgtgacgctcgaaattaaacaacggaacctctcacgaaattcaaatggtcataacttttcacacggagatccgattcatgcacatcacatatggagacgtccgaaattgaaccacggaagatctcgagaaattcaaatgggcataactnttcactcggatgtncgattcacgcgcatgatatatcgagacgctcaaaattgaacaacggaagctctcgataaattaaat

SEQ ID NO: 17015 - DNA, 338 bp, Glycine max
agcttcttcattcaattttgaccgtcttgatatgtgaagggactcaatcagacatccgagaaaaaaactattgtcgtttgagttggcttaaaaccttcacattcaatttcgagcgtctcgatatgttaagggactcaatcagacatccgagtaaaagttatgggcctttgaattggctcagagcttcaacattcaatatcgagcgtctcgatatggtacgggactcaatcacacatccgagaacaaagttatcgtccgttgagttggctcagagcttcaacattcaatttcgagcgtctccgtatgttaccggacctcatcagacatcccgagaaaaa

SEQ ID NO: 17016 - DNA, 432 bp, Glycine max
  unsure at all n locations
ntgagccaactcanacgataataactntntactcggatgtctgattgagtcccgtaacatatcgagacgctcgaaattgaatgttgaacctctgagccaattcaaacgacaataacttttttcacggatgtctgattgagtcccgtaacatattgagacgctcgaaattgaatgttgaacctctgagcaaattcaaatgacaataactttttactcggatgtctgattgagtcccgtaacatatcgagacgctcgaaattgaatgttgaagctctgagccaatacaaacgaccataactttttactcggatgtctgattgagtcccgtaacatatcgagacgctcgaaattgaatgttgaagctctgagccaatacaaacgaccataactntttactcggatgtctgattgagtcccgtaacatatcgagac

SEQ ID NO: 17017 - DNA, 435 bp, Glycine max
tgtttcagtctcaaataaaccaatgaagtaatattatggttcaatatcatggaagtaagcacattcggtccaccatgaaactttaattgatttagagcaaataactcatgataatatcacccccacacaaatgaatcacgtacgttttctacaagctccaatgccaggtcctttgctgattcaccatcaagataatacactgacccaattaaattgctaaacttatcgacaccttccaggacaagccgaacctacataccattaggattagaaaattttcagaattgcaaaatcaatataacttatagaaacacattactcacttctcgattcaatacacgcatctcagtgaaaaatttagcatcatgtgcaaaaggatcggctgcagtttcagcaacagatgttgaaactgcaagcctttgtgcagatgtaagt

SEQ ID NO: 17018 - DNA, 411 bp, Glycine max
agcttattacttttatttcgagcgtctagatatattacaggactcaatcaaacatccgagtaaaatgttactggcgtttaaatttgcttaactctccagctttaaatttcgagcgtctcgatatatgacgggactatatcagacatccgagtaaaaagttattgtcatttgaatttgcttagagattcaacattcatcttcgagtgtctcgttatattacgggactcaattatacattcgagtacaaagttattggccgttgaattttctcagagcttcaacaatcaatttcgagcgtctcgatatattacgggactcaatcaggcatccgagtaaaaagttattgtcgtttgaattggctcagagcttcaacattcaatttcgagcgtctcgctatattacgggactata

SEQ ID NO: 17019 - DNA, 371 bp, Glycine max
  unsure at all n locations
ctaagctttgagcaaattcaaacaacaataactttntactcagatgtctgattgcttttccgaatatatcgagacgctcgaaattgaatgttgaagctctgagccaattcacacgacaataactttttactcggatgattgattgagtcccgtaatataacaagacgctcaaaattgaatgttgaagctatgagccaattcaaatgacaataactttttactcggatgtctgaatgagtcccgaaatatatcgagacgctcgaacgtgaatgtgaacctctgagccatttaaacgacaataactttttactcggatgtctgattgagtcccgtaatatatcgagacgctcgaaattgaatgttcgaagctt

SEQ ID NO: 17020 - DNA, 415 bp, Glycine max
  unsure at all n locations
tctttattttcaattacgagcgtctccatatattacgggactcaatcggacatccgaattaaaagttattgtcgttagatttttctcagagcttccgatttcaattacgagcgtttcgctatcctacgggacataatcggacatccgagtcaaaagttattggtcgttgaatttgctcagagcttcagttttcaattacgagcgtctcggtaaattacgagactcattcagacatccgaattaaaagttattgtcatttgactnttcatagagcttccgttttcaatttcgagcatctcgatatattacagggctccatcggacatccaagttaaaagttattcgtcgttgatttttctcagagcttccgttntcaattacgagcgtctcgaatcctactggaccaatcggacat

SEQ ID NO: 17021 - DNA, 421 bp, Glycine max
  unsure at all n locations
ttggagtttccaagtgccaattcgncttcttctttaanccattcttcttctggcttcaattcttcagtgggctttccttctgtgtccagcatcttgggatgttcccagcctttgatgacagctttccaagttctgctatccagtgatttgaggaaggccaccattcttgctttccaatattcatagttgcttccatcgagaattggtggtctgttcactggtccgccttctttctccatgttcatcaaacgtatctcctagatctcactctgtgatttcgagtgttggctctgataccaattgaaattctgataccaggggacagatgtcgtacaggatgtcacgacatcacgcttcagaacatgcagattatatgtgtccgtatgaacagattaaaccaagtaataacacaagagaattg

SEQ ID NO: 17022 - DNA, 400 bp, Glycine max
  unsure at all n locations
ttcttagtcttagaggggatggaccttttcaagttttggagaggatcaataacaatgcctataggttggacctcccagaagagaatggagtcagcaccacttttaacatttctgatttaattccttttgcaagtggagcttatattgaggaggaggaactaacaaatntgaggtcaaatcctcttcaaggggaaggggatgatgcaatcctccctaggaatggaccagtcactagaatcatgagcaagaggctccaagaagattgngctagaattgctgaagaaggccctanggttctcatgaacctcanggtagatttctgagcccatgggccaaagttgggtccaattatctttgtacatattagactangatgtcattatatttggccttggattta

SEQ ID NO: 17023 - DNA, 359 bp, Glycine max
tccatcaatattaaagactgcttttaggacacgttatggtttctatgagtatctagtcatgccctttggtgtgactaatgctccaggtgtgtttatagaatacatgaatagagtctttcacccttaccttgatagttttgtggtagtattcataaatgatattttggtatactccaagactagagaagaacatgaagaacacttgaggattgtgttgcataccctttgggactgacaactatatgctaagctatcccgtgtgattttggttagagaaagttagtttcctagggcatgtgatatctcaagggggcataactgtagatccctctaagatagaagtcgctcttgagtgggag

SEQ ID NO: 17024 - DNA, 396 bp, Glycine max
  unsure at all n locations
agctttttaattgttagttagaaccatanatacctagcctcaccagtaggttacaaaatatttataaagtataaaccgtacctatttaaagcctatgaagagagagagtcacacagttttcccatcacaaggtcatgttaaaactcaacatgaaaagatacattccctaagttgatttgtgctctcttttaaactgactactaaattgagagggacttttaaattactgaactattcttcaattaacattaataaaggatccttggttcctttgtagcagggtcctcttgctgctccggttcttcaacacctgacaaaagcagatttaagcaagatgtactnttggggtttccaagtgttggacatcaatggtgtgcagtgctttctcacacggac

SEQ ID NO: 17025 - DNA, 426 bp, Glycine max
  unsure at all n locations
tttcttctctcgtatgaaatgaanatcaatctctatgtgcttagtcctttcatgacaaactgggtttgaggcaatatgaagagcatcctgattatcacaatacaacttcattggcaactcttcacaaaacctcaattcctgcagaaactatttaatccacatgagctcacaagtaaccatagccatagatcgatattcagcttctgcactggaccgagcgacaactgtctgtttcttgtttttccaagaaataagatttcctccaatgaagacacaatagcctaatgtagaccttctatccatgggacaaccatcccaatcagcatcacaatatcccgatagttgtgtattacccttgtcttcatacaataaccctagaccaggagctttttaagatatctcagatacgcatgacagcattccaat

SEQ ID NO: 17026 - DNA, 409 bp, Glycine max
  unsure at all n locations
tgcntttgcatcnngngagaacccacatgggatcaaatgacaaagcatatcagtctgtttatcaggaacctgatgaagatgagattgtgggtgtttccctctcacggtcacttctaagtgtagctgcttcagctttgatgaccaatataacagacttangccctcttgtcttgccctattccgagcagctgcgctatggatggtcagtgatttccaggaaaatgtgggcaaggcggaacaaggaaatgtatgttccanatttcatgaaggctttngagcatttctgcatacatgctggtggtaagtcagtcgtagatgccatagaggagagtctgaagctgcacaagaaagacggtgaagcctcaaggatggcattatacagaattggcaatacttcatcttcttctgt

SEQ ID NO: 17027 - DNA, 366 bp, Glycine max
  unsure at all n locations
ttctttttattttacatggattatcaatgatcttttaatatatatctgtattcccttatcaatacattatnttggagtaaaatgtcaagttttacatacttgacataacagattgtcattattctagtcagctatcaatgatctattatattaatgcagctcacaacagattcctttgtttctttaatacaagcatataattctaagacagatagtttggttaatttacgtcctgctcagtcagtggtctgggatgccatggtgccttccaaaaagaggacatgtgcaggtcgtccgaaaccctcatctgttgagaagctcaccagagacctgtgcactattcttcatgaacaacagtctttattt

SEQ ID NO: 17028 - DNA, 426 bp, Glycine max
  unsure at all n locations
agcttctacattcaatttcgagctnttcgatatattacgggactcaatcggacatccgagtaaaaagttattgtagtttgaatttgctcagggcttcggtattccatttcgagcgtctcgatatattacgggactcaatcggacatcagagtaaaaagttattgttgtttgaatttgctcagagcttcggtattccatttcgagcatctcgatatattacgggactcaatcagacatcggagtaaaaagttattgtagtttcaatttgctcagggcttcggtattccatttcgagcgtctcgatgtattacgggactcaatcagacatccgagtaaaaagttattgtcgtttgaatttgctcagagcttctacattcaatttcgagcttttcgatatatttacgggactcatcagacattcgagta

SEQ ID NO: 17029 - DNA, 427 bp, Glycine max
  unsure at all n locations
ttgagaaaattcaaacgacaatatctttntactcggatgtttgattgagtcccgtaatatatcgagacgctcgaaattgaataccgaagcgctgagcaaattcaaacaacaataactttttactcggatgtctgattgagtcccgtaatatatcgaaaagctcgaatgtgaatgtagaagctcagagcaaattcaaacgacaataactttttactcggatgtctgattgagtcccgtaatataccgagatgtcgaaatggaataccgaagctctgagcaaattcaaacaataataactttttactcggatgtccgattgagtcccgtaatatatcggaacgcttgaaatngaatgttgaagctctgagcaaattcaaacgacaataaacttttactcggatgtcttgatgagtcccgtaatatatcg

SEQ ID NO: 17030 - DNA, 429 bp, Glycine max
actaagcttacaacattctcgtgcgttatctccctgagtaactgctgtatcaaatgatattcactcaaaaccaatccaaaccgccaaaccattaaataattttttttttataaaaaaaagcctcctctggctcaagcctcttcaaggtttccaaatactagaaactacagagaactaacaaaagaaaaggaaaatagataaatgaaaaaaaatggcaatttcttcagaaactcgaaattaaaaacaatctaagcgaattcgcttcgaatttcaaaattacaacttccctaggtgtaattaagcaagcagagaaaggaataccatgatttcacgtatggcggtgggagagacaccatcgccatccttggattggcttgaattttttatggcgaatggatttccgcgattggtggaagacttgatgcgagc

SEQ ID NO: 17031 - DNA, 436 bp, Glycine max
tagcaaatggacctgggtattgctcagtttcattatatcttccgtaatactcatcacctctatcatatctaataatttttatatttatgtctaattgcccttttacttcattgtagtaaatttctaaggcatccattgcctaagaaatctcgggcagtaagtagacataactgtaacgtgaataatcatcaataatggtgataaagtatcattcctttccgaaagaactaacatcaaaaggtccacaaattcaatatcacaatttcaagaagctgagtgcttcttgtagctcttttctttgtatgttttgcttgttttcccttaatacaacccacataaatatttagatccgtaaaatctagataaggaagaatttcattctttattaatatttccatcctttctctagaaatgtgacctaaacgtttatgccaca

SEQ ID NO: 17032 - DNA, 302 bp, Glycine max
agcttttccaaagaagatggtgtcatccgcaaactggagaatattcactgcgaccttgttcttccccaccataaagctgtgaaataagtttcttgacactgcttccctcatcaatcctgttaacccttcagcaaccaagacaaataataaaggggccaagggatccccttgtctcaatcctctttgaggcttaaattcatcagttgggcttccatttacaaggatagatattgaggctgatgtgaggcatcctttaacccaaccaatccacctttcatgaaaccccattcttctcatcatat

SEQ ID NO: 17033 - DNA, 410 bp, Glycine max
  unsure at all n locations
agcttgtatgtaaactatatgccttggttaacctggtaacccaattggccatgaataaaaaatctgcacttgtcgccatactctatggtttatgctcctctgttgaccaccacacagacctttgcccttctgtgcagcaatctaaagcaattgaacagcctgaagcttatgctgcaaacatctacaatagacctcctcaacctcagcagcaaaatcagccacaacagaacaattatgacctttccagcaacagatagaatcctgngtggaggaatcatcccaaccttagatggtcgaatccttcacaacaacagcaacaacaacaacatccttattttcagaatgttgttggccctagcagaaccatacgttctccacctatccagtagcaataacaacaacagcaacag

SEQ ID NO: 17034 - DNA, 426 bp, Glycine max
  unsure at all n locations
agctttataattctctatagataacaatcacccttgagcaatccctaatcatgtgaagaaatgactccttaatcgctccacacctgcaacaagaaaggttagaagataaatgtcgtttaacacgaaaagaaattgtagggaggctgccatggaaggcaagtcaaaggaagaatttgacanttttaggtaaaggaggcttccaaacacaagaccagttcactagaaaagaagaatgaatggcaggctctcggattaaccactcgaaggcatatttagttgaaaagcaccctaaactagatgggttccatataattntgtcaagcatatgaataacaagtgtggtactcatcattttgagtctaatattanttggtagagttgataaacagtgtcccaattcactgccctcaatggaatgtattatgc

SEQ ID NO: 17035 - DNA, 381 bp, Glycine max
  unsure at all n locations
tatcttattttccgatcgcgaccctctgttcatcagtggattctggcaggagctntttaagctcagcggcactcaccttcgtatgagttcagcctaccatccacaaagtgatggtcagactgaggttatgaatagagtaattgagcagtatttgcgcgcttttgttcaccgtcggcccggaaattggcgtaaatacttaccctggattgagctctcacacaacacttcatggaattccggcacaggttccacgccctatgagattacatttggacgataaccttcttcattaccggaatacatctcgggaacttcanaatttgatgctgtggacgaatctttatacaccgagaggaagtgttcattgcattcgtagaaatt

SEQ ID NO: 17036 - DNA, 429 bp, Glycine max
  unsure at all n locations
tgcttgtactttccagtgatggaatgaatccatatggcagtttaagcactcaacacagttcatggcctattttgctagtaatttaaaacttgtctccttggttgtgcatgaagcaaaaatgcatgatgttatctatgatgatatcaagcccaagacaactaggaaaggacattgatatttatctcagtcccttgattgaagacttgacaaagttgtgggacaagggggttactgtgtttgatggtatcaaaataagacatttaagttgcgtgcaatgctatttcgtaccattaatgactttccagcatacgagaatntgagtggatatagtgttaagggccatcatgcatgctctatatatgaagaagacacaagccatgtacaattgnacatggaagaaaatatatacactcggcattgcattttcta

SEQ ID NO: 17037 - DNA, 416 bp, Glycine max
acctcggtggtaaaaggtatgagcatttgaatttctcgagagcttccattttttaatttcaaacgtctcgatatattatgcgcccgaatcggacatccgtgtgaaaaattatgaccaatagaatttctcgagagcttacgttggtcattctcgagagcctctatataggatgcgcctgaatcggacatccgagttaaaagttatgactatttgaatttctcaagagcttccgttgcccaattatgagcgtctcgatatgtgattcgcatgaatcggacatccgtgtgaaaaggtatgactatttgaatttcacaagagcttccgttgctcaattttgatcggctcgatatgtgattcgcccgaatcgaacattcgtgtgaaaaggtatgaacatttgaatttctcgagagcttccg

SEQ ID NO: 17038 - DNA, 419 bp, Glycine max
  unsure at all n locations
agcttgtctacttccttcttcactacatcaagaatcactgggttgagtcttctctgtggctgtcttactggtttagccccatcctctanatttatctaatgcatacatgtggatgggctaataccaggaatgtccgccagggtccagcctatagccttcttatgcttcttgagaattgataaaaacttctcctcttgctcatcaacaagggaggcaaatataattactggaaaacgtttgctatcatccaagtaagcatattttanatttgatggcagaggcttcaattctggtgtgggcggttggataatggtagaaggagatggtntctcagcctgtacctcataaagacagtcagaggtatgtgtacttcctgaaacatggctagttctatcagactctacgacacctactctacg

SEQ ID NO: 17039 - DNA, 427 bp, Glycine max
  unsure at all n locations
agcttttctgaaacatcatctaacacatcctttatgggagaaataacattagactcatcaaaggaaacatgaatggatccttcaatagtcataantctcttattgtatattctatatgctttactatgcaaggaataaccaaggaagattccttcatccgacttggcatcaaactttcctaagtttcttttccattatttaatacaaaacatttgcaaccaaagacatgcatatgtgaaatgtttggttttctaccattgaataattcataaggagttttctttaagatgggtcttattaaagccctatttaagatgtagcatgcagtgttaacagcttcagcccanaagtattttgaaagtggagtatcatttaataaggttcttgctatttcttctaangatctattnttcctttcaacaacacc

SEQ ID NO: 17040 - DNA, 428 bp, Glycine max
  unsure at all n locations
taacctanatggctcccattccttccctaaaccacattctttctgaattctttagtgtctacaccttcttggcgccaaatgaacgtcttgctcattctcgtcttccaattaaattaatgtaagaactaagaagggttcttggtatactctctctaactctaacacaacacacatgatgtattagtattagtttaaatttagtgaaaattataaaataaaataaaaattcaacaaatgttaagttgaatccacagaacttatatttttaactaataataaaagaacgtgtttaaaagagcttgttggtaatattttttcatgtgtaattaaatgtaggtaattattatacaagttcatttaagacattgtgctgtttggtttagatttaatttaatatactgtgaatatcaacttgacattttattttt

SEQ ID NO: 17041 - DNA, 441 bp, Glycine max
  unsure at all n locations
tatcagtcaagcccatanataaatgtggcaaaatttgccatgttataaaaataaggtcgaaatgtggaattaagtctactattaatatactatttatctaaatatataaatacatagtgtttttttactttaaataggatatcaattttatatttattagattcaatcattaaaaactaatttttttaaacgggggaactttttggatataaaaatctattgttagataaaaattaattcctttaaaaaagataacgcaaatattattataaagtctatacatatatatacattagaatataccttaaaaaatttatttattntattattatctaaacaattagtatatataaatattctacaatagaagaattccaatatataaatatatagtacatagatnntaatatatgtgtgaggtaattctactttntaaatatt

SEQ ID NO: 17042 - DNA, 433 bp, Glycine max
  unsure at all n locations
agcttttaaagttagcattanatgtaaactaggcgaatcctaagagtgtttggatgaccacattcaaggttcccaacaaaacactcactatcctaaggaagaattgcctaaaattattacacacaaatggaattntggtaacctattggaggctcccaacacacttccattgaaaggcctttttgttacaaaacttgaaagcaatgaaggtaagtaaattgcaaattacaaaattacaaaatggtcctcaattntggtggttgttctctctttggtgattcactcaatttggagtgcttcttagtccaatagctcttaaggtggttggttcctttcttcttgactcanattcttcaaggcatggcaccaatcctccttccaattccctatatggcaacccacanacaaggaaacaaagagacaagcaataatc

SEQ ID NO: 17043 - DNA, 439 bp, Glycine max
  unsure at all n locations
cttgtgcattcaatatcctgatgagggtgttccatatgttcttatgactgttctaatacatttgctgcccaagtttcatggtcttgcaggtgaagatccttataagcatcttaaggagttccatattgtttgttccaccatgaaaccccctaatgtccaagaaggtcatatctttctaaaggcttttcctcattctttggagggagtggcaaaagattggctacactaccttgctcccaagtccattttcagcanggacaccttaaagggtgttcttggagaaattctttcttgcatctaggaccactaccatcagaaaagacatttcaggcattaggcaacttagtggagaaagcttatatgaatactgngtgagattcaagaaactatgtgccagttgtcctcactaccagatttctgagcagcttctccttcaata

SEQ ID NO: 17044 - DNA, 435 bp, Glycine max
  unsure at all n locations
ttcttgttagccaaatccacacactcgtcttcgttcagttgattaatagtcttctggtaaggtatgcagcctattggcccaacgtttcctatgacaaactttctagcatccatttggtaaagtctctgccattccaatcaaacatgccaagttacacatgacaaaaaataaaataaaataaaatacagtaaatntttgtttggattnttttttaataaacatttataaaagaaaaacccaaaagtaaactgaaataaacttcttgcctcatcaatcaaaatgaaataagttaatttataaaaatccttccacttaattttttcaaaaactgattntaacttataagagaagtttaactcgtgtatcttntttatcttagaataaggaaacaagaaggtaanataaaacaatnttttataaatngatataacttat

SEQ ID NO: 17045 - DNA, 433 bp, Glycine max
  unsure at all n locations
tatcttttgcaacagcattattaattntgtgagccccagtgtgattgagatcttccctcttcagataaatgtgaggtccttcaccattaggcctcttgtaatgctccgtcaacctttcagcaaaataaagaggactctcccggccaacataatcttttagaatcccagccagttctgtctgcaactcaaaatctaagaaaatttccattgtttttccttccaggaaactacatttcatggtttctgaatgtagttaacatacaaatatgagagatgtgctagtatgtangagagacaganagttattctgaatctaattgagtgaagattaacatggagttccaaattggttagttctgtatgaaactcgaaaaatanaagactaaagaaattctgaagaatgaaatgatacacattcaaacagtcacaaaat

SEQ ID NO: 17046 - DNA, 388 bp, Glycine max
tagccattgcgaattatatgcagtcgaacatatattattatgatctttatctttattctttagtataaacagaaaagatcgactttgatcagtatatgtcctatggcaatctattaaacaatttaattaattaattattcgacagaatacatatctgcaagtttcaatatatattttattcaacccaaaacttatctatatcaggaatatgagtaattatgtttcaacaccataaatatttaacaaaaaagaaattagttcgatatagctataactaaatcatagcagattatcaatcaagttacatgtagtagtgtatcctattgaaatgaaactatctttgagagtcttatgagctaagcacgttagaatttggaattagggtatc

SEQ ID NO: 17047 - DNA, 434 bp, Glycine max
  unsure at all n locations
tatgctgcaaacacttataatagtatctcctcaacagcaaatccaacaacaatagaataattatgacctttcaagcaatagatacaatccaggttggaggaatcatccaaatctgagatagacaagtcctccacaacaacatcagcctgtccctcctttccaaaatgctactggtccaagcaagccatatgttcctcctccaatgcaacaacaacagtagcagtcacaacaaagacaacaagcactgatgccctcctcaaccttccttagaggatttagtgaggcaaatgaccatccagaatatgcaatttcagcaagagacaagagcctccattcagagtctgacaaattagatggggcagatggctactcagttgaaccaagctcaatcccaaaattctgaccaattgccttcacanactatgcagaatccg

SEQ ID NO: 17048 - DNA, 422 bp, Glycine max
  unsure at all n locations
tggaggaagaaggagatgaataaagggagagggagagaagatcatgattttttgtgctctaagagagctctgaaatctgaagtttaattttcaaatgatcaaagttgaaaaaattgcacacacatgacctctatttatagcctaagtgtcacacaaaattggagggaaatttgaatttctattcaaatttcacttgaatttgtggagccaaattttggagccaaaatttcactaattatgattagtgaattttaacctggttctcccactaatccaagatgaagtccaagattctccactaagtgtgcttaggtgtcatgaggcattgtaagcatgaaggacatgcacaaagtgtgactatatgatgtggcaatggggtgtagcaagcaaattctcaccttcccctctnaaatttaattgga

SEQ ID NO: 17049 - DNA, 402 bp, Glycine max
  unsure at all n locations
agctttatttnttaattacgagcgtctttatatattacaggactcaatcagacatccgaattgaatgttattgtcatttcacttttcatagagcttccgttttcaatttcgagcgtctcgatatattaaagggctcaatcggacattcgagtaaaaagttattgtcgtttgatttttgtaagagcttccgttttcaattccgagcgtctcgatatcctatgggacacaatcaaacatccgattcaaaagttattgtcgtttgaatgtgctcagagcttcagttttcaactacaagcgtctcgatatattacgggactcaatcagacatctgaagttaaattattgtcatttgacttttcatagagctctcgttttccatatcgagcgtcttgatatattaat

SEQ ID NO: 17050 - DNA, 430 bp, Glycine max
  unsure at all n locations
ntaagaanagtcaaccgacaattacttntgacttcggatgttgattgtttcctggaanacatcgagacgctccaaattgaaaatggaacctctaagaaaagtcagacgacaataacttttaactcggatgtctgatcgagccctgtattatatgaagacgctcgaaattgaaaacagaagctctaagaanagtcaaacgagaaaaacttttgactcggatgtccgattgtgtcccgtatgatatcgagacgctcgactgaaaacggaagctctgagaaaaatcaaacgacaataacttttaactcggatgtccgattgagccctgtattatatcgagaccctcgaattcgaaacggaacctctaaaaaagtcaaacgacaataacttttaactcggatgtccgattgagctctctaatatatcgagacgc

SEQ ID NO: 17051 - DNA, 406 bp, Glycine max
agcttttattatgcatgtcatattcttaatagggctccttataaaattttgaaaaaaacctttatgagttatggagaaaaagagaaccaaatatgaaatatcttaaagtgtgggagtgtcttgcaaaggttaacatccctattaataagaaaagaaaaattggaccaaccgttgattgtgtttttgttggatattttttgcatagtactacttatagattcttggttgttaattctaaagtgttcaaaatttctaataatactattatggaatctagagatgacactttctttgaaaatgtttttcctttggaaaaaaaaaattgtctaaacccgtttgtgatacttcttattctgatttgtcatcttgtagtaattctaataaggatgttgtttttgaacctata

SEQ ID NO: 17052 - DNA, 411 bp, Glycine max
ttcttgcaagcttaaacattcaatttcgaggctctcgatatattacgggacttaatcaagcatccaagaaaaaatttattgtcgtttgaatttgctcagagattcaacattcaatttcgagcgtctcgatatattacgggactcaatcagacatccgagtaaaaagttattgtcgtttgaattggctccgagcttcaacattcaatttcgagcgtctcgatatgttacgagactcaatcagacatccgagtaaaaagctattgtcgtttgaatttgctcagagattcaacattgaattgcgagggtctcgatatcttacgggactcaatcagacatccgagtgaatagttattgtcgtttgaattggctcagagcttcaacattcaatttcgagggtctcgatatattacg

SEQ ID NO: 17053 - DNA, 410 bp, Glycine max
  unsure at all n locations
tgtttattggacttgtactctaacttctttaatttccacatcttgtggaactgtactcccattgatttcaccattttcaatgaatcttgcatttccagctttgaaaattctcatactatgattaggacaataaaacatataccccttttgacttttctggataaccaatgaaatatccactgattgttcatgcatccaattttctttcttgtggattataaatccttatttctgcttggcaaccctaaacatgcaagtgccttatactaggtgtctttggaactgccttactaggaaccctattcaacaaatacatggtattnttcaaggcatacatccacaaagatacaggtaaatttgaattacttaacatactcctaaccatatccattaaaattctattacgcctt

SEQ ID NO: 17054 - DNA, 394 bp, Glycine max
agtttcttacaaagcatacggctttctggatgtagatgatgatatctatacagatggatcttatatatctatatatctatagatagatatatacatatagatatatagatatagatcatacaatgaagtaccgcacgagtgggtatatacgaatccaaatctgccgaatcactcatgttatgatcttctacatcctaggtcttcccgtgccttcatctggcttatgttcttcatgtagcattcagactgaatgactctatgatatgacgtcgctacttccacatggtacgggtaacgtacgagacatctctatttttcccggggggaatccttagagtgaccacagcttagctttcaattcgcctctgaccatcaaatgaaatgtgaataaccc

SEQ ID NO: 17055 - DNA, 411 bp, Glycine max
agcttttcatcatgggctaagtttgaaattgggagggctgctgtctattggaaaaccatgaatggcctccctcctacttcagtaagtataaaagtattgagttaactcattgcttgttattcaatcaattatctttcagtaaaaaaatttacaaattttggcagggagaaaagctaaaacttttctataatccagctgcaactcaacttgtccctaatgaagaatttggaattgcttttaatggtaatttttgcaatgttacttggttgcccaaaaatgtcatttgccattgcatttgtaaggaaaaatatttggattcattataaacagacataaactgcaccaagaacaagcgatataaattacacatcgtaattcagaattagcatgtatgtttggagtcaatggaaa

SEQ ID NO: 17056 - DNA, 397 bp, Glycine max
agcttctctaaatattatgcgcctgaatcggacttccgggtgaaaagttatgaccattggaatttctcgagagcttccgatgttcaatttcgagcatctggatatattatgcacctgaatcggacttccgtgagataagttatgaccatttgaatttctcgagagcttgcgatgctcattatcgagcttctcgatatataatgcgcctgaatcggacattcgtgtgaaaagctatgaccattggaatttctcgagagcttccgatgttcaatttcgagcatctgaatatattatgtgcctgaatcggacatccgtgtgacatgctatgaccatttgaatttctcgagaccacacgttggtcaatttcgagagtctcgatatattatgcgcctgaatc

SEQ ID NO: 17057 - DNA, 414 bp, Glycine max
  unsure at all n locations
agcttgtttattcaaatttcaagatacaagtgaactccccaagaagtgacatggcccacttgtggttttccaatctagcttacattctgcaaagttagaatatgaaaatccaattaaactcaaggaggtacctttggggtaccttaaaccaacattggttgtgcccttaaggtacttaataatccttttgacaacatttaaatggtattccttgggattttatttatatctttcacatatgcacacacttagcatgatgtcaagttggcttgtagtcaaatataggagataaccaatcatacctctatactttgactcatctaccgatttacctttttcatccaagtcaagataaatggatgttgccattggtattgtttcttccttacactnttccatattgaaattcttaat

SEQ ID NO: 17058 - DNA, 413 bp, Glycine max
  unsure at all n locations
agctnttangattttcaaacgacaataactttttactcggatgtctgattaagtcccgtaatatatcgagacgctctaaattgaatgttgaagctctgaccaaattcaaacgacgataaatttttactcggatgtctgattgagtcctgtaatatatcgagactctcgaaattaaatgttgaagctctaagcaaattcaaacgacaataactttttactcggatgtctgattgagtcccgtaatacatcgagacgctcgaaatttattgttgaagctctcagcaaattcaaacgacaataacattntactcgtatgtctgattgagtcccgtaatacatcgagacgctcaaaattgaatgttgatgctctcagcaaattcaaacgacaatagacttttactcagatgtctgat

SEQ ID NO: 17059 - DNA, 413 bp, Glycine max
agcttgcatgatttacatctccccctttctcaagaaaattcttctttatatcatcaaattcttcatgatttacaagaaggtccacctgcatgaaattttttgttaggaagctttctcttttgtgcgactatgtcatcctctttctcaggtgtagaagcaagcttgacaggttcaggtgcaggtgctgctactagtggaggcacttgaatctggttgtcagacttcaaggtgatggcactcacattttttggattctgcatagtttgtgaaggcaatttgtcagaattttgggactgagcttgattcaactgagtagccatctgccccatctgatttgtcagactctaaatggaggctcttgtctcttgctgaaattgcatattctggatggtcatttgcctcactaactcttc

SEQ ID NO: 17060 - DNA, 407 bp, Glycine max
tgtttgtatgctaccgggctcatcctctcaacaattttaaagggtccatagaaacgcctcgaaagctttgactggcctgttccggccaccgtggtttgccgatatggtctcagcttgactagaacccacttatttacctgaaactcatggtccctgcgatgtccatccgcgatttccttcatgcgagcctgcgctttctgcaatttccggcgaaggaggttaaacatgtcttccctctgactgagcaaatcgtccactgttgctacagtggaggtgcctgttaagtattggggcaaacttggaggtttgcggccaaatgtaacctcgaagggtgttagcctcgtggctgagtggacagacgtgttatacgaccactctgcccacaacaggaagcgcccccacgaact

SEQ ID NO: 17061 - DNA, 411 bp, Glycine max
tgtttgttggtcaactacatgccttggttaacctggtaacccagctggccttgaatcagaaatctgtacttgttgcaagaatctgtggtttatgctcctctgccgaccaccatacagacctttgcccttctgtgcagcaatctggagcaattgaacagcctgaagcttatgctacaaacatctacaatagacctcctcaacctcaacagcaaaatcaaccacagcagaacaattatgacctctcctgcaacagatacaaccccgaatggaggaatcaccctaatctcagatggtctagccctcagccacaacaacagcaacctgctccttccttccagaatgctgctggtcgaaatagaccatacgttcctccaccagtgcaacaacaacagctaccacagcatcaacaga

SEQ ID NO: 17062 - DNA, 411 bp, Glycine max
agcttgtatgtaaactagatgccttggttaacctggtaacctaactggccatgaatcaaaaatcaacacctgtcgccagactctgtggattatgctcctctgccgaccaccacacagacctttgcccttgtgtgcagcaatctgaagcaattgaacagcctgaagcttatgctgcaaacatctacaatagacctcctccacctcagtagcaaaatcagccacaacagaacaattatgacctctctagcaacaggtacaatcccgagtggaggaatcatcccaaccttagatggtttaatccttcacaacagccgcagcagatacaacagccttattttcagaatgctgctggcccaagcagaccatacattactccaccaatgcaacaacatctacagccccagaaacaga

SEQ ID NO: 17063 - DNA, 403 bp, Glycine max
  unsure at all n locations
tttgcttgcaagctntgagcaaattcaaacaacaataactttttactcggatgtctgattgagtcccgtaatatatcgagacgctcgaaattgaatgttgaacctctgagccaattcaaacgacaacaactttttactcggatgtctgattgagtcccgcaatatatcgagacgctcggaattgaatgttgaagctttgagcaaattcaaacgacaataactttttactcggatgtctgattgagtcccgtaatatatcgagacgctcaaaattgaatgttgaagctctgatccaattcaaacgacaataactttttactcggataattgattgagtcccgtaatataactagacgctcgaaattgaatgttgaagctctaagccaattcaaacgacaataac

SEQ ID NO: 17064 - DNA, 410 bp, Glycine max
agcttatgcttctaaaaagctataggtaatgtaatgtaagaagcaagtgtatgatgaattacttcatgtttctaattctccttattagtgattatctaattaacaatttcatgaaattaacagcttcctgaatacattggcattttcaaagatcatgaagaaatatgataaggtgaaaattcaattacccttcacttcattttactcatttaaactttattatctgtactatcacttgacatagtaacttcataattcagatcacgtcaagagatgcagctgaagcttatatgagaatggtggacaactcccaccttggaagttctgatgaggtgagagtgctaataagaaagtctcccattgagattcattattcttttacatgtaacttctatacaccgttagtttaa

SEQ ID NO: 17065 - DNA, 411 bp, Glycine max
  unsure at all n locations
agcttgatataacatagtcaaggctgtttccactatatgtccgtgcttcctttctaccagaccattttggtggtgtgtatgagggcatatgagtctatgaataataccaagctctgcaagatacttagtaaaaggtctgtattcccctccccaatcagactagacagctttaataggcaaattaaattgagttttcaccatagtttgaaactgtgtaaagataggtagtgtctctgatttatttttcaacaagtacaaccaagtgaaacaagtgtgagcatcaacagaagttacatagtatttataaacagtgtaaatgagttcaaaaggagttgaatacacagtaagagagggagaggagggaagttatgagattcgccaatgcaacaatgggaacaanagtcagaactt

SEQ ID NO: 17066 - DNA, 411 bp, Glycine max
agcttgctacatatcacctatgttcaccactagggttccttcagatgggtttatatctatccactctcccttatttgatctgacttgaagccctcctatctcatgttgatataagatagtaatacaactcatatcaatgtgcatcccaagcccctcaacttgatcttctataacttctggagctgagtaatcgtttacccaacatatccaaccatgaacactccttcatacttgattcacttcttgtttgttcttttggttactttcatccgatagtcttcatgatgcaaaccatttacctttcaaaattttacctatacctcaatttttgctactgcacatggtaattggtaagcctaacaagtacatggaaaaaaggagatagaccccactggtttgcaagtaaactaa

SEQ ID NO: 17067 - DNA, 409 bp, Glycine max
  unsure at all n locations
agcttgtaattgaacaatggaagatcttgagaaattcaatcggtcttaacttttcactcggaagtccgattcaggcgcataatatattgagacgctctcgtgaaattcaaatggtcataacttttcactcagaggtccgattcaggcgcataatatatcgagatgcacataattgaacaacggaagctctcgagaaattcatatggtcataccttttaactcggagttctgatttaggcgcataatacattgagacgctcgaaattgaacaatggaagctctcgagattttcaaatggtcataacttttaactcggaggtccgaatcaggcgcataatatatcgagacgctcaaaattgaactacggaagctctcgagaaattcaaatggtcataactnttaactcgga

SEQ ID NO: 17068 - DNA, 408 bp, Glycine max
tgttatatcaacaactgttttaagatattgtaaattctatgcactttgtttaaactacaaaatcattgcttcaaaagttaagagatgatgggtgggagccattaaagatgtcaaaaatttttgtgttagtaatgttattgatattcttgattttaatactcaatatttaagaactcgaggtaagccccgtcataagaatgttgacacttttgtgactatggagaaccgttttagatatgacatatttacaactgccattgactttcaattacaagagctgaataataggctttgtgacctaacaatggaattaattatttttagctcagctttgagtcttaaggatgtttctaaatccttcaaagttgattatatatgaaatttagttgcataatattatcaaaggat

SEQ ID NO: 17069 - DNA, 398 bp, Glycine max
  unsure at all n locations
agctnttagctcaaatttctggctaacttatcttttattccactaacgacagagaaaggatttaaatgcttaattaatgtagttttaaaaggatgttgatctctccattgcgtangcaagagcaagacaacgcttaccaaacaaaaaccgctcttaatttttaaaacatataataaaatgttcccttattataataatcaaattgacttcaattagcataaaaataatagcctttagtgggacaatccatagtaacctaggaaactcagtacaaatacacattaaaaatacaaaagcccaaggatataatatgcttcaaatatttgttttccacactcaaattgccatatcacgggtgaataagtgaattcaaaccaagatctaaacaaanagctatc

SEQ ID NO: 17070 - DNA, 392 bp, Glycine max
agcttgttattgaacaatggaagatcttgagaaatgcaatcggtcttaacttttcactcggaagtgcgattcaggcgcataatatatcgagacgctctcgtgaaattcagatggtcataactgttaactcagaggcccgatctatgcgcatagtatactcagatgcacatcatggaacaacggaagctctcgagagacttatatggacgtgacctttaactcggagttctgattcaggcacataacacattgtgacgctggagatggaacaatgaatgctgtcgagactttcaaatggacataactgtggacgtggaggcatgactcgggcgatgagatatagagacgctcataatgaactacggaagctctctagaaaatgaatggcacta

SEQ ID NO: 17071 - DNA, 415 bp, Glycine max
  unsure at all n locations
agcttttttacatgcatgcatcattcccagtgaaaattaagtcatcaacatacaaactcacaattaaaattcttttacctcctcctgttttgacaaagagagtgtgctcatgatcgcatcgttcaaatccctccttcacaaaataggcttcaattttgctataccaagcacgtggtgcttgctttaacccatataaagctttcttaagcttgtagaccttctcttcttcaccctttcgaacataacccggtggttgttccacatacacgtcctctgtcaattctccgtgaagaaatgcgcttttgacatctagttgatacacattccatcccttttgtgctgctagagctaaaaccatccggattgtgtcccaccttgctaccggngcaaacacttcgttgtagtcaatcccttg

SEQ ID NO: 17072 - DNA, 407 bp, Glycine max
agtttgtgtcacaattcactgtgacagtcaaagtgtcattcacttatcaaatcaccaaatgtaccatgagaggacaaagcacatagatgtgaaactacacttcatcagagatgtgattgaatctgagaaggtgaaggtggagaaagtttcaacagaagaaaatccggctgatatgttcacaaagtccctctctagtgtcaagttcaagcactgcctggacttgatcaatttcgaagatgcctaaagcagtttggtagaagtgcagccctaaatcacaaggaagacacttgctgatttggagtcaaggtggagatttgtggtgtgtgactcaaaatcacaatttgcacaagtgagaaggctttaaagtggtgttgtcataaatgttatcaagtattataactgaattg

SEQ ID NO: 17073 - DNA, 404 bp, Glycine max
agcttgttattggacaacggaagctctcgagaaattcaaatggtcataacttatcacactgaggtccgattctggcggatagtatatcgagaagctcggaattgaacaacgaaagctctcgagaaattcaaatggtcataacttttcaaacggaagtccgattcaggtgcataatatatcgagaagctttaaattgaacaacggaagctcttgagaaattcaaatggtcgtaacttatcacacgggagtccgattcaggcgcataatatatcgagaagcttggaattgaacaacggcagctcttgagaaattcaaatggtcataacttatcacacggaagtctgattcatgcgcataatatatcgagacgctcgaaattgaacaacggaagctctcgagaaatt

SEQ ID NO: 17074 - DNA, 413 bp, Glycine max
agcttgtatgtcttggatcttcttcacaaatggagtaatttgcttcttgaagatcaatagcagcgtaatggagatggaagaaagatgattggagacgccacttcaaggagaagatgtgtcaagaaaaaactcaccaccataggaagtcatggataagagcttgaaggtaggagaagatgaatggaggaagagggagagaaggagcacgaaattttgtgcctcaaatgagatttcaactttgaagtgtgattctcaaattatcaaagttgaaaaaatgcacatacatgacctctatttatagcctaagtgtcacataaaattggagggaaatttgaatttctattcaaatttcacttgaatttgaaattcatgaatttgtggagccaaagtttggagccaaaatttcactaatt

SEQ ID NO: 17075 - DNA, 399 bp, Glycine max
  unsure at all n locations
agcttgctacttgaggagggaggannnntnngcttcttgaatatcaatancaacgtcatggatatggaagaaagatgattggagacgccacttcaaggagaagatgtgtcaagaaataactcaccaccataggaagtcgtggatatgagcttgaaggtaggagaagatgattggaggaagatggagagaaggagcacgatattttgtgcctcaaatgagatttcaaccttgaatggtgattctcaaattatcaaagttgataaaatgcacatacatgacctctatttatagcctaagtgtcacatacaattggagggaaatttgaatttctattcaaatttcacttgaatttganatgcatgaatttgtggagccacagtatggagccagaatctcact

SEQ ID NO: 17076 - DNA, 396 bp, Glycine max
agcttgttattgaacaacggaagctcttgagaaattcaaatggtcataacttgtcacacggaagtccgattcaggtgcataatatatggagacgctcgaaattggacaacgaaagctctcgagaaattcaaatggtcataacttttcaaatggatgtccgattaaggcgtatattatatcgagaagcttgaaattgaacaaaggaagctctcgagaaattcaaatggtcataacttatcacacggatgttcaattcatgcgcataatatatcgagaagcttgaaattgaacaacggaagctctcgagaaattcaaatggtcataacttttcacacggaacaccgattcaagcgcataatatatcgagactctcggaattgaacaacgaaagctctc

SEQ ID NO: 17077 - DNA, 395 bp, Glycine max
agcttgtagaatagttaaacgacaacaacttttgactcggatatccgattgtgtctcgtaagatatcgagacgctcgtaattgaaaacggaagctctgagaaaaatcatacgacaataacttttaactcggatgtctgatcgaaccctgtaatatatcaagacgctcgaaactgaaaagggaagctctaagaaaagtcaaacgacaataactttttactcggatgtcttattgagccctgtaatatatcgagacgctctaaattgaaaacgaaagctctatgataagtcatacgacaataactgttaactcggatgttcgatagagccctttaatatatcgagacgctcgaaattgaaaactggagctctaagaaaagtcaaacgacgataactt

SEQ ID NO: 17078 - DNA, 389 bp, Glycine max
agcttatgaaggttgcttaatatctccaacagaattactgcaattaatccctaatatttataattagctgacagtctgatcatgctgatatatatcaataagttaaatttgatagtgatactgttgtatatattaaactacattgagatttggcaaaagcaaaaagctattaaacaatgtcttgtgttgcattctcattcaagaaacaggtttcaacttctgtacaaaacagaaaatccttacaataaaagaaaacagcttctgttcaaatttgcctcatcttatctgtctgtgtctccattagcatgatttacaggtcattcaaatgacaggcgacagttaggaactcatccttcttacatggtattgtgagaccacccattgcgtgc

SEQ ID NO: 17079 - DNA, 394 bp, Glycine max
agcttgttttttaattatttgtatgggttggatgttgaattctggttgttcctggtgcggagatgatggtacagcgggtgaaccagaagcggaagtttcttttggtgaggaagccatggaaaaacagagcgtttggaatgatttcataaatctcagaaaactattgggaaatgctggagaaaacacgaatgcctagcagatataaatttgaatgaagaatgtagaggggcgtgtgaagcaacggtcgaatttgctttgtggtgaacgtgctattaatgttaagtgattcgtttgggcacgttcagattgcagtagctgctataattcctctagcaaacaaatgcccagcttgcccctcagtttttcaaactgatttgcatccaaagcctttgtg

SEQ ID NO: 17080 - DNA, 382 bp, Glycine max
agcttttacccatgacttcctatggtggtgagcttgttcttgactcatcttctccttgaagtggcgtctccaatcacctttcctccttctccattccgctaccattgatcttcaagaagcaaaggactccattgatgaggaagatccaaggcctacaagctctacattgagctacatcatgtggtattagagcatcttcatctaagcgatgttcttttgcttcctctatctttttgttcggtcaattgactttaattccttgttcttcatcatcttctccatgtatctgctccattgtcttatggtttggctatttttagagtagattcaacaaaataaaccgattaaatcttagataagcactcgttcttgcatttctatg

SEQ ID NO: 17081 - DNA, 280 bp, Glycine max
gcttgagtcgaaaaccgcaggcgtgaccttggctcattacctgtcatgggattttttaaggctccgctcggcttacatgaaagtctggctaggcccacgatcctatttgaaagcttgcttaaagacgtctctgataaatcaattattttaaatcctaatgaaatacttactaaaaaaagaaacttatgaaatcccttattagtaatgcacaaattctaaaataattgataaacaaaatgattatgaattctactcgtaaagcacacagtatattaaaaaa

SEQ ID NO: 17082 - DNA, 396 bp, Glycine max
  unsure at all n locations
agctntttcttctgattcagacaaggtcaaaggtagcttggctatccgacttttgagaaatctaattgcatttcccatgctgattgacagaggtcgacactcaataagaaatgatacataactaccaatttttgctgtcaagtctctcacaagagtcttctcaggtggaaccttgtagtctttgatggcctcttgaaatgcttgaagcattgcaatgcaacgagcattgccaccagatatatctccagttagatactgcaagcccacctgaaacaccataaaacaagatcattaagatttgggaaaaaatatttcaaaaggtctaggtcacaaaacatattgacctgacccaggtcctaatcactgatattcattaaaacaccataaattttaatt

SEQ ID NO: 17083 - DNA, 385 bp, Glycine max
agcttgtaatctattacacacatactgtaatagattaccataagacattatcagaaaatatcctcaattgtcacatcttttcatttggatcttgaatggctatcaaaggcctatatatatgtgacttgagacacgaatttgctaagagtttttcacaacaaaaaggtcttatcctcttaaaaagacaaatcgttttatcctcttacaaattccttggccacaacacttgtgattcaataaggaattatctgagtgctcaaattgatcaatctatctttttcacgagagatatcgtcttatcttcttctctattctgaaaagggattaagagaccgacggtttcttgttgtgaaataattctaaccacaatagaagaattgtcctt

SEQ ID NO: 17084 - DNA, 387 bp, Glycine max
atcttttccagatagaatgtcaaagatggacgatactttaacacaatttatgcaagtatccagcacaaaccagaagaagactgatgcatctattaaaaatctagaagttcaagtatgacaactggcaaaataactatccgaacaaggaagtggatctttctcagcaaccacacaggtcaacttaaaggaacattgtaatttaattacaacaaggttggggactatggttggtttgaaggataatgatgaaaaaagaataaaaaaagagttgaaaaagaaaacgagaaaaatgatgaagtgatgactagtgaaaaagtggaagacaaagtggtaagtgaagaagagaagaagatatcaaatgaacaaaccagtaataaaggtaaagct

SEQ ID NO: 17085 - DNA, 370 bp, Glycine max
agcttgttcttatacaaacgaccataactttttactcggatgtttgattgaggctcgtaatatatcgagacgctcgaaattgaatgttgaagctctgaaccaatataaacgacaatgaccttttactcggatgtatgattgagtcccgtaacatatcgagacactcgaaattgaatgttgaacctctgagcatattcatacgacaataaattcttactcatatgtctgattgagtcccgtaacttatcgagacgctcgatattgaacgttgaagctctgagccaatacaaacgaccataactttttactcggatgcctgattgatgctcgtaatatatcgagacgctcgaaattgaatgttgaacctctg

SEQ ID NO: 17086 - DNA, 389 bp, Glycine max
tagcttgttcacctttttcctcacatcttccttcattgatgggttgagccttctttggggctgtctgactggtctgtaatcttcttccatcattatcttgtgcatacagtaagcgtggctgattcttttgagatctgatatgtgccacctaattgcctccctgtatctcttaaggacctttaccaacctgttttctttttctgctgtgagctcactgctgatcaccacaggcttggtcttgttcttctccaagaacacatacttcaggtggttgggtaggatcttcagctttaccttggtcttctctgatggactcccgcttttcaattcttcgaaactggtccccattacagtaatattgtcttcacaatctaagtcttccaagaaag

SEQ ID NO: 17087 - DNA, 374 bp, Glycine max
  unsure at all n locations
tttntttttatcccatctacgcatggaagacctttcatcatattcttttcatgtaccaacttcaaagcttgagtgtggaagtgaccaaatcttcgatgccataaccatgaatcatcaattgttgctctcatggaaacgctagtactagtagtatacttgaagcttattggaaaaatactatttactttcaacattttaactttgacaatctctgtgcttttgctagttgtatcaaatactgcacgtatctcctttgaatgaacagattagtctttctccatcatttgtttaatgcctaagagattgtctttaagatctggaactaaccatacatctctgatgaatcttgtacctttctttgtctacagcatgat

SEQ ID NO: 17088 - DNA, 387 bp, Glycine max
  unsure at all n locations
tgctangttattttcatacgctatgagtcttaacttattcagctcattcaattgttgctacctgaagctacctacaatcctaagatcagagttcataaactatatagcccacatggctgcgtgaacaagtccaacaagcagatggaaattctttccataaactatactaaagggagacatcatagcgggagccctacagggttttatgtatgcccatattgtgtcatccaatttcaatgaccaaatctttctatatgctctcacagttttttgtaaaaccttctatagatacctattatatacctcaacttaaccaattgcttgatggtgatacaaagtaataaccttatgggtaacaccatatttagccacatggctatcagacaa

SEQ ID NO: 17089 - DNA, 391 bp, Glycine max
agcttccatgtccaagtttcttatgccagacccaatgatcttgtttgacataaagtaagcaagattttgatttgataactctcttagtctaatcttataaagatttccttttctcttagcagaataaagtaaagacacatttttgttctggatgatacattcatccttgttaaagaaaacatcatatccattgtcacataattgagttatgctcagtagattgtgtttgagccatttaaaaaataagaaattatcaataggaggatatggatgtatacctatcttacccactcttgttatttgcccttttttattccctatgaaagtgatggttccaccatgataaggagtcatacattggaacatgcacctttctcctgtcacgtgccat

SEQ ID NO: 17090 - DNA, 367 bp, Glycine max
tatcttgtatccggtgcttgatgtcagggtgatgtttcctatcccaacagtcttgctcctatcttgatttcccatttgcatcgtaccaaagtcaccgctttggtaggatgagaagaaacttccatgtggagtaacatggaaggaggcaccggaatcgacaatccaagagctatcatcacaagcaatgtttatgatattaccttcaccaacgagatataacaaatcttcttttgaaactacggcagtagtattcttcttttctttcttctttgttgggctgacttggtctggcttaacgttaccgattgtgtgatctctcttgaaggattgacattctatcttcctgtggcccatccttccacagtag

SEQ ID NO: 17091 - DNA, 398 bp, Glycine max
agcttcattctttcctcttagtaatgccttattcatcatatctacaccattaaaggatttcaccttcaaagggccacaaacatttgaatgcaccaattcaagcaactcaaattttctggagggagaatgcttcttgaaggatactctggtttgcttaccaaccatgcaacatgaacatttctccaaatttgcattcttcaatcctagaaacatatccttcttggctaaacaattcagccctttctcactaatatgactaagccttcagtgccacaaaaatgcctccatatccataacattcacattgtctctagcaaccaaagcttttgcccaatacaactttgaaagtttctcccccttggccacaattatgttacccttagtgagtttccactttc

SEQ ID NO: 17092 - DNA, 357 bp, Glycine max
agcttttagctaattcaaacgacaataatgttttgctcggatgtctgattgagacccgtaatacatcgagacgctcgatattgaatgttgaagctctcagcaaattcaaacgacaataactttttactcggatgtctgattgagtcccagaatacatcgagacgctcgaaactgaatgttgaagctctcagcctattcagacgacaataacttttttactcatatgactgatcgagtcccgcaatatatcgagatgatcgaaagtgaattctgaatctctaagctaattctaactacaataactttctgctcggatgtctgattgagttccgtaatctactgagacgctcaatattg

SEQ ID NO: 17093 - DNA, 393 bp, Glycine max
agcttttctgtgcaaggaatatccaaggaaaattccatcatctgacttagcatcaaattttcctaagttttcattaccattgtttaatacaaagcatttgcaaccaaaaacatgaagatgtgaaatattgggttttctaccattaaacagttcatatggagttttctttaaaatgggtcttattaaagacctattcatgatataacatgcagtattaacggcttcagcccaaaaatattgtggaacaggagtatcattgaataaaggtctagcaatctcttccaaagatctattattcctttcaacaactccattttgttgaggggttctaggtgcagaagaattatgttcaatgccatgcttttcacaaaatagatcaaattctttattttc

SEQ ID NO: 17094 - DNA, 241 bp, Glycine max
atcgaaaagttggctgagacttgtattttcttcacaaacggggcatgcatgatgacccttaacactgtaaccgctgagattcccacatgctggaaagtcactaatgagacagaagagcattgcactcagtgcacaggtgatacttgagaatcgcatcggtctctactacaccctgattccacagatttctcatatcgtcaaccaacggacttagatagacatctgtgatctttcctggctg

SEQ ID NO: 17095 - DNA, 387 bp, Glycine max
  unsure at all n locations
agctttcttcaacaaacaaagccttgattcaagatttcttcaagatcaagccttgcctcaaaacaaagggtttcaaagtcatgcaaggctctggtaatcgattaccagaagggaagtttgagaaatagctgttgaaaagggttttgaaattgaaatttgaacatgtaatcgattaccatntntttgtaatcgattaccagcaatgaaactcctgatattcaaattcaaaagtcacgacccttcaaaatataattgtgtaatcgattaccagaaacctgtaatcgattaccagtgaagaaattcatataaaacttcttgaaaagacacatctctttacaccatattgaaaaggcatgaatggcctatatatatgtgtgtgtgtgactt

SEQ ID NO: 17096 - DNA, 423 bp, Glycine max
tgtagggttaaagtctcacgattgtcacgtgctcatccaactattgttagccgtggctatacgagacatcttgccaaacaaagtcaggttcacgataactcgcctgtgctttttcttccatgctatatgtagcaaagtgattgatccagtaatgtttgatgagttggaaaatgaggccgcaattatactgtgccagctggagatgtattttccccctgctttctttgacatcatgattcacttgattgtgcatctggtcagagaaatcaaatgttgtggtcctgtttatctatggtggatgtacccggttgagcgatacatgaagatcttaatagggtatacaaagaatctatatcgtccggaagcatctattgttgagaggtacattgcagaagaagccattgaattttgttcagaatactt

SEQ ID NO: 17097 - DNA, 428 bp, Glycine max
  unsure at all n locations
aatggatgtaaagagtgcattnttaaatggcttgattcaagaagaagtatatctagattatcccctaggatttgaaaactcagacaagcctaatcatgtttataaactgaaaaaggctttatatggtttgaaacaagccccaagggcttggtatgagcgtctgagtaaatttattttaaataaaaaattntctagaggtaaagtggataccactctttttataaagagaaaactaaatgatattctattggttcaaatatatgttgatgatattatttttggatccactaatgagtcattatgcaaggaattctctcttgacatgcaaagcaagttcgaaatgtcaatgatgggagaattgaattactttcttgngttacaaataaagcaaactaaagaaggaatanttttcaaccaagaaaaatact

SEQ ID NO: 17098 - DNA, 448 bp, Glycine max
  unsure at all n locations
tanacattcaatttcgagcgtctcgatatattacgggactctatcaaacatacgagaaaaaagttattgtggtttgaatttgctctcagcttcaacattcaatttcgagcgtcgcgatatatattacgagactcaatcagacatccgagaaaaaagttattgtcgtttgaattggctcagaggttcaacattcaatttcgagcgtctcgttatattatgggactcaataagacatccgagtaaaaagttattgtcgtttgaatgtgctcagaggttcaacattcaatttcgagggtctcgatatattatgggactcaaccagacatccgagtaaaaatttattgtcgtttgaattggctcataggttcaacattcaatttcgagcgtctcgatatattacgggactcaatcaggaatccgagtnaaaagttatgtcgtttgatttggc

SEQ ID NO: 17099 - DNA, 454 bp, Glycine max
  unsure at all n locations
tatgctgcanatatttataatagaccccctcagtagcaaaactcaacaacagttttataattatgatctttcaagcaacaaatacaatccaggttggaggaatcatccaaatctgagatggacaagtcctccacaaaaacaacaacaacctgtccctcttttccagaatgctgctggtctaagcaagccatatgttcctcctccaatacagcagcagcaatagcaacagtcacaacaaagacaacaagcaactgaggcccctcctcaaccttccttagaagagttagttaggcaaatgaccatctagaatatgcaatttcagcaaaagataagagcctccattcagagtctgacaaattagatggggtagatggctactcagatgaaccaagctcagtcctaaaattctgacaaattgccttcgcaaactatgcagaatccgaaaaatgtgagt

SEQ ID NO: 17100 - DNA, 409 bp, Glycine max
  unsure at all n locations
tgcatagcagnttctactacttaagctgattacatagttgtatgaagttgttgtactcaaagtctttggatgaagcaacaactcgaagactttggagtaaaccttgatcacattcctctaaaatgtgacaacacaagtgctaccaatctaacaaataacccagtcaagcattctaggactaaacacatataaataaggcatcattttcttagagatcatgtgttaaaaggtggctgctgcattgagttcattgatagtgagcatcaactagaagaaattttcactanatcttctgctagagataagttttttattagaaatgaactatgcatgttagatgcatctagcataaaatgacattctgtttgcatagtgtgtgatgcacattgctactcatatcnatttgttt

SEQ ID NO: 17101 - DNA, 457 bp, Glycine max
  unsure at all n locations
nttgcaagctggaatcatttatcctatctctgatagccgatgggtgagtcccgtccaggtggttccgaagaagaccggcctcacagtgataaaaaacgagaaggaggagctaattcctactcgggtgcataacagttggagagtctgcattgattataggaggctgaaccaggttaccaaaaaggaccattttcccctgccattcattgaccagatgcttgaacgcctggcaggtaaatcccactattgtttccttgatggtttttctggttatatgcaaattactattgctcctgaggatcaggaaaagaccacattcacctgccccttcggcacttttgcctataggaggatgcctttcggcctgtgcaatgcccctggtaccttccagcggtgcatgattagtattttcagtgattnttagaanatgcatagaggtgtcatggatgatttcact

SEQ ID NO: 17102 - DNA, 405 bp, Glycine max
  unsure at all n locations
agcttcttatctaatgctcatcttggtggtgaagcttcttcttccaaggcttattccctaatggatggcgcatcctctctcctcttctcctttgtcttccgctgcatctccatggtggaaaatcaccattaaaggacctcattgaagctcaaagatccagcctccatagaagccccacaagcaagcttcctaaggtgttcctcctcagttttagacttggcgatcatgtcgtctatgtagacttcgatctctcggtgcatcatgtcgtggaacacagccaccatagcccattgataggttgccccgacgttcttgagcccaaaggacatcaccttatagcagaaccttccncacagggtgacgacacatggtcttttccatatcctctggtgccatctttatctg

SEQ ID NO: 17103 - DNA, 468 bp, Glycine max
  unsure at all n locations
ctcaagcttgctaacccatggaagctcctaatatctcccacactntntggggtgggccattcttggatggccttgattntctcagggtccacttggaccccatttctaccaactacaaaacctaagaaaactatattatctacacaaaaggtacacttctctatatttgcatagagggtgtttttcctaaggactgaaagaacttgcctgagatgtcctaagtgatcatctaggctcctactgtacactaaaatatcatcaaaataaacaactacaattctacctaggaaatcccttaagacatgatgcataagcctcataaaggtgcttggtgcattagtgagcccaaaaggcatcactagccattcatacaaaccaaacttggtcttgaaagccggtntccactcatcacccnttttcatcctgatttggtgataaccactnttaagatcaatttntgaaaagata

SEQ ID NO: 17104 - DNA, 448 bp, Glycine max
  unsure at all n locations
tctaaaggaggtcaacaacaggatgggtgtaaggaactatggttgattaaactttctagcaaaataacagtttttgcttggaggttaatagaagataggctaccaaccaagatgaatttacataggagacatgtgcaactgcaggatctgcgatgtcctttctgtaaagaagctgtagaggaggcatctcatttgttcttccattgcatcttcatccaaccaatttggtgggcatcgatgtcttggctgaactatcatactgcctttcctcttgggcctaaacaaaattttctacagcatatcttcactgaggtaaaaggattaaagattaagagatggagatattggtggatggcggtcacatgggctatatggaaactcagaaacagaattctgttttcgaatgcagaattngatgctaacagattgtttgatgagggctgtttct

SEQ ID NO: 17105 - DNA, 462 bp, Glycine max
  unsure at all n locations
tgatgataaaggtgaaaaatgtatctttcttggtgttagtgttcagtcaaatttatataaattgtataatcctaccactaaaaagatcattattagtcgtgatgttgttttttatgaagaaagattntgggaaaataacatagatgaaacaaatcaaattcttgcaaactttgatgaagagttgcagacaaggttgctagaagagcaacaaatttcagcaatcacagttgaagatgaaagacctcaacgagcaagaagaaggcatgcatggatgtctgattataaggtaacagaaattgaagatccgattacttattttgctttgttttcatattgtgaccctacaacctttgaaagtgctgtcaaagaagaanaacggagaaaagcgatggatgatgaaattgattccattaaaagaaatgatacttngggattgtgtgatcttccaaatggacataatat

SEQ ID NO: 17106 - DNA, 449 bp, Glycine max
  unsure at all n locations
actcaagcttatctgctcatacattgcctcttcttttgaaaaacattnctctacgagaatctcatccactatcatctagagcttggtttctgaatgacaagtgataaatgacagtcgaagcaactttataaagcatgatttgaatagaaaagtataaatgtatactaatatataatattattatagcgcattaatatatctaacttataaccatttatttatctcttttataatatactctcttctattttcatttctaacattaattttaataaatcgttctagaaaatggttaatatttaattatcgttatatcatatttaaattgttcatcttcaattcagaatataatgtatgaatttagaaatatttagttattataataaagatttaattatataaaaacaaatatcgctctgaagaagcttaattcgcatctatatcctatt

SEQ ID NO: 17107 - DNA, 439 bp, Glycine max
  unsure at all n locations
tgacccttacgagtcagtttagtcaaatgtttagctaactatgagaaaccttctatgaatctcangtagtatcctgctaagcccaaaaatctcctaatctcaaaaatagatttaggactctcccattcaagaacgacttctatcttagagggatctacaactatacccccttgagatatcacataccctaggaaactaactttctctaaccaaaactcacactntgacaagttagcataaagttgtcggtccctaagggtatgtagcacaatcctgaagtgttcttcatgttcctctctagtcttggagtataccaaaatatcatctatgaatactaccacaaaactatctangtaagggtgaaagactntattcatgaagtatataaacacacctggagcattagccacaccaaaaggcatgactagatactcatagt

SEQ ID NO: 17108 - DNA, 428 bp, Glycine max
  unsure at all n locations
tctggtgggacatcttgacttgctttccaatctgacattcttcacagattctgccttcttctattttcagattgggaatgcctctaacagcacctttgtcaataattttcttcatgcctcttaagtgcagatgtccaaatctttgatgccatattttgacttcatcttctttggagaatagacatgtggaggagtaactggtttcttgaggtgtccataggtaacagttgtcctttgatctgctgcccttcattaggacttcactcttctcatttgtcaccaagcattctgactttgtgaagtttacattgaatccttcatcacacaactgactgatgctgatcaagtttgcagtcagtcccttcaccagcagtactttgttcagactangaagtccatcatggactagctttcccattccagtgatc

SEQ ID NO: 17109 - DNA, 406 bp, Glycine max
  unsure at all n locations
tgtatttcagtatcttattgatcagttatgccaaatgcctgtattggccttacctgattntacaaagacttttctagtggaggtggatgcttcaggagtgggggtcggagctgttctcatacaagatcaccattccatagcctttataagtagaagcttaaatgttcagcaacaatccatgtcaacctataagaaagagttactagctgtggtgtttgttgtacaaaagtagagacattacttattacctaagcagtttgtaatcaaaactgatcacaaaagtctcaagtatattcttgaccagagactttccacagctttccaacaaaaatggttggtaaaacttatggaatttgatttcattattgaatacaagtagggaagtgagaaccaagctgctgatgca

SEQ ID NO: 17110 - DNA, 416 bp, Glycine max
agcttatttatatcgaggcgctcgaaattgaacaacggaagctcttgagaaattcaaatggtcataacttttaactcggatgtccaattcatgcgcatcacatatagagacgctgaaaaatgaacaacggaagctctccagaagttaaaatggtcataagttttcacactgatgtccgattcaggcttatattatatcgagacgctcaaaatttaacatcgaaagctctcgagaaattcaaatggtcataacttttcactcggatgtccgattgcagcgcattacatatacagactctcgaaaatgaacaacggaagctcccgagaaactcaaatggtcataactttttacactgatgtccgattcaggcctataatatatcgagagcgctcaaatataacaacggaagctcttga

SEQ ID NO: 17111 - DNA, 415 bp, Glycine max
agcttctggtgggacatcttgactagctttccaatctgacattcaccacaaattctgccttcttctattttcagatagggaatgcctctaacagcacctttgtcaatgattttcttcatgcctcttaagtgcagatgtccaaatctttgatgccatattctgacttcatcttctttggaggatagacatgtggaggagtaactggtttcttgaggtgtccataggtagcagatgtgctttgatctgctgcccttcattagaacttcactcttctcatttgtcaccaagcattctgactttgtgaagtttacattgaatccttcatcacacagctgactgatgctgatcaagtttgcagtcagtcccttcaccagcagtactttgttcagactaggaagtccatcatgagctagct

SEQ ID NO: 17112 - DNA, 396 bp, Glycine max
atcttatctgataaatgtatttgtatgcataattaatttcatgcaatatatttatgactatatattctaaaatataaattgcattggtaatatattaaaatgtagaatgtttgttttacatgtcatggaaattatttataactaaatttatactaaatttttcggcaagtttttctgaatgcatatatactaacattgtcaatcaaaaattaatctttcatcttgttaaaaagtgtaatattaaaaatatatttatagctaaaaaataactttgaaagtttgttgttgtcttacaaacaatgctcaaaagaaataaaaacgagagaatgaaaataaaatcgaaaatagtgaagggggaatattcatttgatctggaaaatattactactactatta

SEQ ID NO: 17113 - DNA, 434 bp, Glycine max
  unsure at all n locations
tctatagaaggttcgttcctaatttctctttctttggatcttctctcaatgagctggtgaagaagaatgtggcatttacctggggtgaaaaacaagagcaagcctttgcttttctcaaagaaaagcttactaaggcacctgttctagcttttcctgacttttctaaaacttttgagctagaatgtgatgcctctggagtgggagttggagttgtattgttacaaggtgggcaccctattgcttattttagtgaaaaacttcatagtgccacccttaactaccccacctatgataaagagctttatgccttaataagagccctccaaacttgggaacattaccttgtttccaaggaattngtcattcatagtgatcatcaatcacttaagtacattagagggcaaagcaagttaaacaagaagcatgcaaaatgg

SEQ ID NO: 17114 - DNA, 300 bp, Glycine max
tcaaacttgcaacaaaggagttgagcatgtataaagattctttcttcaacttttagaggtgactttgagcgtctgtttatggaggagtcccaatcaatttctgattatttttctcgagtattggcccgtatcaattaacttaaaagaaatggtgaagacgtttatgaagtgaaggtcatggaaaaaatacttccaactttacatccaagttttgacttcattgttaccaacattgatgaaaacaaggatgtaaagaccatgactatcgagcaacttatgggttccttacaagcatacgaa

SEQ ID NO: 17115 - DNA, 453 bp, Glycine max
  unsure at all n locations
tcaagaaaaagatggcctcagcaaactccttatttccagattggaattctatcaatagacctccaatctttaatggagagggttaccactactggaaaacccgaatgcaaatttttatcgaggcaatagatctaaatatctgggaagccatagaaatagggccttatatacccaccacagtagaaagagtttcaatagatggtagttcatcaagtgaaagcataaccatagaaaaacctagagatagatggtctgaagaggatagaaaacgagtacaatacaacctanaagccaaaaacataataacatctgccctaggaatggatgaatatttcagagtttcaaattgcaagagtgctaaggaaatgtgggacactcttcgattaacacatgaaggaactacagatgttaaaagatctanngataatgcactaactcatgagtatgaattat

SEQ ID NO: 17116 - DNA, 392 bp, Glycine max
  unsure at all n locations
agcttatagccttttcaaacgacaataactttttactcggatgtctgattgagactcgtaatataacgagatgctcgaagttgaatgtttaagctttgagccaattcaaacgacaataactttttactcggatggttgattgagtcctgtcatatatcgagacactcgaaattgaatgttgaagctctgagccaattcaaacgacaataactttttactcggatgtgtgattgagtcccgtcatatatcgagacgctcaaaattgaatgttgaagctctgagccaattcatacgacaataactntttactcggatgtctgattgagtcccgtaatataacgagacgctcgaaattgaatgttgaacctctgagcacattcaaacgataatat

SEQ ID NO: 17117 - DNA, 421 bp, Glycine max
  unsure at all n locations
taaacattcaacttcgagcgtctcgatatattacgagtctcattcaaacatttgagaaaaaagttattgtcgtttgaatttgctcagaggttcaacattcaattttgagcgtctcgatatatgacgggactcaatcagacatccgagtagaaagttattgtcgtttgaattagctcagagcttcaacattcaatttcgagcgtctcgatatgtgacgggactgaatcagacatccgagtacaaagttattgtcgtttgaatttgctcagaggttcaacattcaatttcgagcgtctcgttatatcacgggactcaatcagacatccgagtataaagttattgtcgtttgaatttcctcagagcttcaacattcaatnttgagcgtctcgatatatgacgggactcaatcttacatccgagt

SEQ ID NO: 17118 - DNA, 410 bp, Glycine max
atctttaacatagaaacctagttagattagtgctttgacaggtttgataacaagaacatatttgtgggtttgacaagaactatatacagctcatgactattctccaaccgagcaccacttggaagggttctacacccaatgagagtcgaggttgtgttgattgccaagcttcaacatagaaacctagttagatttttgggttactgtgtggaaggagaagaaaaaatgctagtatatgaatatatgccaaacaaaagcttggatgctaccattattttttgtaagactatttattgcatttgaaatattttgtttacgtgcctttttttgtacactcaaaattctattttgaagtagactaatgtaatgtatcatgcccctaatgaactacaagactgaaagttgtgtgt

SEQ ID NO: 17119 - DNA, 430 bp, Glycine max
  unsure at all n locations
tttgtttggaattcattntcaattacctcttagttctgaacgcatgataataatatgtaccaaaagcatacaaagcatgataatatgttggacagagctcttcatatttttgcttggtgtaaattaatgaaaagttggtgcgtttggttaagtgtttattaactagatttgaaattatttgattntatatatganattgatttttattanaaatgaaattaaaataaagtgtcatgtttataaatattcattntaaagtaagtttatattacaacttaatatgattctttaacttanaatgaaaattttatttagagaataaaatatggagttatagtcatcgattaanagttaataatttaaattaattcatatattagagagtgatttgaattgtatcaatattggtcagcggctganaatgaaaaca

SEQ ID NO: 17120 - DNA, 402 bp, Glycine max
agcttttactctctatgtctccattatccagcaatatcttggctcttttatttggacattgagaagcaatatgtccaactccttggcacctgaaacatttgatatcatgggatctagaagatgaattaatttccattttacctttaggtgtagcaaatgaatttttggacttagcttcatctttttgactttgtcacagatttgttgttttgccaatttgacttccacaaagaagtggaagcaaatttggaagtactattagctttgcattgcctttccacttgaatagatttgtgcaacaagtcttccatctccacataatgctacaattctaccatattagctatctctttctttatacctccaatgaatctggccatagttgcctcacagtcttcttca

SEQ ID NO: 17121 - DNA, 443 bp, Glycine max
ataagttagttataccatagtctaaatattaatatcaatttatggaaaactaatgatcaatgttacatgcacaggtataataaattataaattatgaatatattgaaatattaatcatcgtgtatgaaatatttactctaatacttattaacatttcttttcttggaagctgcgaagccactaatgatttaatttttttataggaattcacttttttaattttcataataaaaaatgattttaaataaacaagtcatttgtcaaaaatgttattataaggaaaaatttactagaaataatcaatcaaaattactcatcaatagatacttcattaaattacttaaaatataacattatagtgatcataaattaaaaggatataaagcataaatcaactactaaccaaatcctagaaacactgcatgtcccagatacaaaatgat

SEQ ID NO: 17122 - DNA, 408 bp, Glycine max
  unsure at all n locations
agctttaagcaaaatcaatcaacaataacattttactctcctgtccgattgtctcccgttgtatatcgagacgttcgatattcagaatagaagctctgagcaaaatctaatgacaataacttttttctcggatgtccgattgtatcccgtagtgtattgagacactcgaaattcagaatagaagctctgagcaaaatcaaatgacaataactttttactcagatgtccgaatgaatcccgtaatatatcgagacgctcgaaattcagaattgaagctctgagcaaaatctaacgacaataactttntactcagatgtccgattgtgtcccgtagtatatcgagacgcacgaaattcagaacagaagctctgagcaaaatgaaatgacaataactttttactcggatgt

SEQ ID NO: 17123 - DNA, 415 bp, Glycine max
  unsure at all n locations
agcttgtgcattcaatatcctaatgagggtgttccatatgctctcaaaactggactaatacatttactgcccaagtttcatgatcttgcatgtgaagatcctcataagcatcttaaggagttccatattgtttgttccaccatgaaaccccctgatgtccaggaagatcatatctttctaaaggcttttcctcattctctggagggagtggcaaaagattggctatactaccttgctcccaggtccattttcagctgggatgaacttaaaagggtgttcttggagaaatgtttccttgcatctaggaccactgccatcaaaaaagacatttcatgcatcangccacttattggagagagcttgtatgagtattgngatagattcaagaaattgtgtgcaagctgtcctcaccacc

SEQ ID NO: 17124 - DNA, 410 bp, Glycine max
  unsure at all n locations
tgctgtgtttttttgattntagataaaactaattgtgtgaaatttattttgtttgaaactaatttataagtgatatgattaatgtttagatattttcattatgaaacttaagagtaaaatttagtataatttttatatcaaatctaaaaactattcaaaattatttaaacccaaaatcaattatagatccaaattcaattttcaaatcttctgtatgcataaaactaaagacaagagtatatctaaaataaattctaaactcaaaataaattcttttacatcaaactaaacacatgatgattntttatttttagttttgaatttataaaatattaaacctaattctaattctgagggtgatgtttcggttttaagatattagatgttgctttaagttgaaaatagataaa

SEQ ID NO: 17125 - DNA, 393 bp, Glycine max
  unsure at all n locations
agcttaacatcagaccacttccagggtgctggaactacttcacatggacttgatggggcctatgcaagttgaaagccttggaggaaagaggtatgcctatgttgttgtggatgatttctccagatttacctgngtcaactttatcagagagaaatcagacacctttgaagtattcaaagagttgagtctaagacttcaaagagaaaaagactgtgtcatcaagagaattaggagtgaccatggcagagagtttgaaaacagcaagtttactgaattctgcacatctgaaggcatcactcatgagttctctgcagccattacaccacaacaaaatggcatagttgaaaggaaaaacaggactttgcaagaagctgctatggtcatgcttcatgc

SEQ ID NO: 17126 - DNA, 436 bp, Glycine max
  unsure at all n locations
tgtangccttggatcttgttcatcaatgtgtttccattgcttcttgaagttcactggcagcggaatggagaaggaagaaatatgattggagatgccacttcaaggagaagatgagtcaagcacaagctcactaccataggaagccatggataagagcttgaaggaggagaaaatgagtggagggagaaggagcatgaaaattctgtgcctcaaatgaggtctgaactttgaattataattctcaaatgatccaaggcctacaagctctacatggagctacatcatgtggtatcaaagcatcttcctctacgtgatgttctattgcttcctctatctttttgtttggtcaattcactttaattccttgttcttctccatgtatctcctccattgtctcgtggtttggtgatgtttagagtagattaaaaaagataac

SEQ ID NO: 17127 - DNA, 399 bp, Glycine max
  unsure at all n locations
agcttttgaagcactgtaggacaggtgcatgttgctgaatggaactatgttttcaattcctttgtagttctttttctatctttagtaaaatgtgatttgttctttgaatttcttcaacctttgtccaatgttcacttgattctaatttatagaatgagcaatttagatggtattattgttttgtctgataaagcagaatgttaaatgcaatttataagtatatatttatcagtaaattggcattcattcctgcaactcaatacaattaaacctattgtatctatgctaaataagaacttaaaatgaactatataaaattatttaattgcacgaatganattatattcatctaagagcttcaattatttgaattacgcagcaattntatgaacgctgttg

SEQ ID NO: 17128 - DNA, 394 bp, Glycine max
  unsure at all n locations
agctattcttcgtgggttgatgggttctgtctcatagaatggcatgatcactggctgacatgttctcaattaactcagttgcttcttctggggtcttcagttttatctttccccctgcagaagcatctaacaattgcttggtttatggtctcaacccatctataaacatattaaatcgaattggctcataaaacctatgggtgtgagttcttctcaataaacctctgaacctctccaatgcttcactcagagattcatcagggaactgatganatgaagagattgcagctttcccttccgcaatcttggactctgggaagtatctctttaggaacctttcaacaacttcttcccatgttttcagactgttacctttaaataagtgaagccacct

SEQ ID NO: 17129 - DNA, 390 bp, Glycine max
agcttggacaatggttgggaaatcttgctaaaatcctagataaatctcttgtaaaacttggatgtcgcagaaaagaacgtacttcccgcacagatgcgtcgtaaggaagagaagtaataacatcgatctttgccttatcgacctcaatacctctactagagactgaatgccctaagactatacctccatggaccataaaatgacatttttcaaagttaagaacaaggttagtctcagcatcggtcaagaactctacagaggttatccaaacatgcatcaaaggaagaaccataaacaatgaaatcatccataaacaccttcatacaactctataataaatcagaaaagatactcaccatgcacctttggaaggtgccaggagcgttgcat

SEQ ID NO: 17130 - DNA, 411 bp, Glycine max
agcttgatccacctgcagttggcaaaatagtggcatatgtggaaaacaattaattaatacaacttttttgtgcaatggaaatgaaaaaaataaggatgatatcttgtaaatggaaacttggggattgtttggttggaccaatttatgcagatacatatacattggaatttatttttctgaggttaatttcagtcatgacctcttggaagtaattatgtcttttgcttctttggatattttgtggttcccattcctaattcattttttaatatctgccacagggtcaaaatcagagttttgatcttcctattaagaaaaggagtgacatctgtacaataatgtatactagtggaactactggtgaccccaatggagtgttgatatcaaatgagagtattattactctcttag

SEQ ID NO: 17131 - DNA, 445 bp, Glycine max
  unsure at all n locations
nttatccatgacttcctatggtggtgagcttattcttggctctccttctcctttaagtggcgtctcaaatcacctttactccttctccattccactgccattgatcttcaagaagcaaaggactccatttatgaagaagatccaaggcctacaagctctacatggaactacattataaatggagaatgtgtacagattgtagggctatcaacaacataactgtgaagtataggcaccccatttctaggcttgatgatatgcttgatgagttgcatgtgcaaacatattttccaaaattgatgttaaaagtggttatcaccaaatagggattagagaaggtgatgaatggaaaaccgctttcaagaccaagtttgggttgtatgagttgctagtgaatgcctttgngctcactaatgcaccaaacaccttcatgaggctaatgaat

SEQ ID NO: 17132 - DNA, 407 bp, Glycine max
  unsure at all n locations
agcttgtaatcgattacacatatactgtaatcgattacctgagcagattttcagaaaatattctcaacagtcacatctttttatgtggttcttgaatggctatcaaaggcctatatatatgtgacttgagacacgaatttgcgaagagtttttcaaaacaaaaaagtcttatcctcttataaagcaaaattgttttatcctcttacaaattccttggccaaattacttgtgattcaataaggaatttttgagtgctcaaattgttcaatctatctctttcaagagagatttcttcttttcttcttcttcattctgaaaagggattaagagaccgatggtctcttgttgtgaaagacatctaaacacaaagtgatgtgaaccttacngtgcacggatcgcttgataca

SEQ ID NO: 17133 - DNA, 407 bp, Glycine max
  unsure at all n locations
agctntggagtttccaagtgccaattcgtcttcttccttagtccagtcttcttctggcttcaattcatcagtgggctttccttctgtgtccagcatcttgggatgttcccagcctttgatgacagctttccaggttctgctatccagtgatttgaggaaggccaccatccttgctttccagtattcatagttggttccatccagaataggtggtctgttcactggtcctccttctttctccatgttcatcagaatttatctccctagatctcactcagtgatttcgagtgttggctctgataccaattgaaattctgatactggngacagatgtcgtacaggatgtcacgacatcacgcttcagaacatgcagattgtatttgacagtgtgcacagtttaagcaagt

SEQ ID NO: 17134 - DNA, 407 bp, Glycine max
agcttctccatgcaaacttcattaaagaggtcaggttttgtacttggcttgccaatgccgtcatggtcaaaaaggccaacggcaaatggcgaatgtgcaccgactacactaatctgaacagggcataccccaaagacgtgtaccctctccccagcatcaataggttggtcgatgaagcgtacgaattccaggtgctaaccttcttggatgcctacttcggatacaactagattagaatgcatcctctagatgaggagaaaatgaaattcataactaaaaatgtcaacttttgttacaaggtcataccattcggcctagaaaatgcaagcgcgacattccaatgaccaatggaccgagtcttcatacaacagatcggacgaaatgtcatggtatatatggatgacatg

SEQ ID NO: 17135 - DNA, 379 bp, Glycine max
agcttctcaatagagttaggcaggtaactctgtaataagtcttaaactctatccctacatacattatgcaaaatatgcagttgccctccctgtagagcttgtaggccttggatcttcttcatcaatggagtcctttgcttcttgaagatcaatggtagtagaatagagaaggaggaaaggtgattggagatgccacttcaaggagaagatgagtcaagaacaagttgaccaccataagaagccatggataagagcttgaagatagaataagatgagtggagggagagggagatgatgggcacgaaatctatttctcacatgaggtctgaaatttgaagtgtaatttctcaaattatcaaagctgaataatatgcacaca

SEQ ID NO: 17136 - DNA, 398 bp, Glycine max
  unsure at all n locations
agcttcacagtttattnttttcaaacttgagttttggaagaccaattactaagtctttcctaactagatgatataaatgatggatgttaatgtgttcaaccctacaatgccacaaccatgaatcatcatctatcttactcaccaagcaacttagctcatgaaaagatgcatgctcaacattcagcatataaatattacctattctcttaccaatgtggacaactttaccagatatggcttcacttataagatagcaatttctgtcaaactcaatcttgaaacctttatcgcaaagttgactaatgtttagaaggttatgctttagtgcatccatatgtagcacattctttatctgagttttgtgttaattccctatatttccttccccagttattttt

SEQ ID NO: 17137 - DNA, 452 bp, Glycine max
gcttcatgatgatgaatcaagttgattcaagtagttttgatgattacaaagatgatgacaaaaagcccaagagaatgatttcaagattgactcaacaagtttcaagaatcaagagaagtttgatttcaagattcaagagaagatgaattcaagattcaagagaagaaatcaagaagacttcacaagggaagtattgaaaagatttttcaaaaaacaaacatagcacagttttttttttcaaaacagtttttctcaaaattttctaagctaccagagtttttactctctggtaatcgattactagtttcctgtaatcgattaccagtggcaaagtttgatttcaaaagttttcaactgaatttgcaatgttccaattaatttcaaaatggtgtaatcgattacaagatattggtaatcgattactagtatatctgaacattggaattcaaatt

SEQ ID NO: 17138 - DNA, 441 bp, Glycine max
  unsure at all n locations
ctcaagcttggatttcctttgctctggaaacctctcctttcttatgtgaacccaaacccatctctccagattggaaaataacctttttgtgccccttgtttgcttgtttaacataactctcattcttcttttcaatttgggccttgactatttcatggagctttttcacatagtccactttggcttccttccttatgcttaaaaactgaaatattagacattggtaacaaatcaagaggagttagtggattgaaaccataagcaacctcaaaaggagaacaactagtggtgctatgcacaaccctattatgagcaaattcaatgtgaggtaagcaaacttcccaatttttaagattctttntcaaaatggtccttagcaaggtacccaaagtcctattcacgacctccgtttgtccatcccgttgagggtgacaagtagta

SEQ ID NO: 17139 - DNA, 446 bp, Glycine max
  unsure at all n locations
tgcccagagaaggagtccacggaggaaatgcttaccaccttttaagactggaaagcggtttctaatgactcctctgcggcctccacataaggcatagaggacgggcagctcaccaagatgtcttcttcgcctgatacgatgaccagatgcccttccactacgaatttcaacttttggtggagtgtagagggaacaacccccactgagtggatccatgggcgccccaacagatagttgtagggggggttgatatccattatttggaaggtgacttgacaggtgtgagggcctatctgtactgggagatcgatctctcccctaacctctcggtgggtgccgtcgaaggcacgaaccaccattgaccttggctntaagtaggaggcattgaatggtaatttctccaaagtgctcttatgcatcacattcaaactggaaccattatcgat

SEQ ID NO: 17140 - DNA, 405 bp, Glycine max
  unsure at all n locations
agcttggatttcctttgctccggaaacctctcctttctcatgtgaacccaaacccaatctccaggttggaaaacaacctttttgtgccccttgtttgcttgtttagcatagctctcattcctcttttcaatttgggccttgactctttcatggagctttttcacatagtctgttttggcttgtccttccttatgcttaaaaactgaaatattacgcattggaaacaaatcaagaggagttagtggattgaaaccataaacaacctcaaaaggagaacaactagtggtgctatgcaccgccctattataagcaaattcaatgtgaggtaagcaaacttcccaattnttaagattctttttcaaaacggtccttagcatggtacccaaagtcctattcacgacctcc

SEQ ID NO: 17141 - DNA, 349 bp, Glycine max
  unsure at all n locations
tatatatncaatagtatttatatggtctatntatgtatatgtgntatatttgataaatgaatagtttgaggtagtataagataacaattttgtatagtttagtttgaattgttaatgttatatatgccagattatnttttgataaatgaatagttttaggtagtataagataataattctgtgtaatttattttgaattgttaatgttatatatgccagattatattttgataaatgaatagttntaggtagtataagataataattncgtatagtttagtctgaattattaatgttatatggtagatatgatatacggttatatgataaattagtgtcgcaacctacc

SEQ ID NO: 17142 - DNA, 369 bp, Glycine max
  unsure at all n locations
tgatgatgaaccaagcaattntgatgatgccaaaagcccatgtgattgattcaagacttcaagatcaagcatcaagaatccaatccaagattcaagagaagaaatcaagacgcaacatgtcaagacttcatataggataagtattaaaagaatttttcaaaaaccaaatagcacagttttgttttacaaaagaattttctcaaaattntctaagctaccagagtgattactctctagtaatcgattactagttatcagtaatcgattaccagtgaccggtttggttntcaaaatgttttcaaatgatttataatgttccaaaatgattntcaagtagtgtaatcgattacactgtattagtaatcaatt

SEQ ID NO: 17143 - DNA, 412 bp, Glycine max
  unsure at all n locations
agcttgtatcggacatctgtgtgaaaagntatgaccattggaattttttatgagcttccattnttaaatttcgagcctctcaacatattatgcgcccgaatcggacatccgtgtgaaaagtcatgatcattngaatttctcgagagtttccgatgtttaatttcgagcgtattgatatattataaccctgaatcggacctcagtgtgacaagttatgaccatttgaatttgacgagagcttccgttgttcaatttcgaatatcactatatgtgatgcgcctaaattggacatccgtgtgaaaagttatgaccatttgaatttctcaagagcttccgttgttcaattctgagcgtctcgatacgtgattngcatgaatcggacatccgtgtgaaaagttatgaccatttgaat

SEQ ID NO: 17144 - DNA, 371 bp, Glycine max
ttcgtcttcttctattgtccagtcttcttctggcttcaattcattagtgggctgtccttctgtgtccaacatcttgggatgttcccagcctttgatgacagctatccacgttctgctatccagtgattcgaagaaggccaccatccttgctttccaggattcatagatggttccatccagaatgggaggtctgtacactaggcctccttctttctccatgttcatcagaattcatctccctagatctcactcagagatttccagtgcccgctctgataccaattgaaattctgataccaatgccagatgtcccacaagatgtcacgacatcacgcttcagaacatgcagattatatttgagagtatgaaca

SEQ ID NO: 17145 - DNA, 406 bp, Glycine max
  unsure at all n locations
agcttttccattttttgcctgatgcctgaaatgtcttttttgatgttagtggncctagatgcacggaagaatttctccaagaacaccctcttaaggtcatcccagctgaaaatagacctgagagcaaggtagtataaccaatcttttgccactccctccagagaatgaggaaaagccttttgaaagatatgatcttcttggacatcagggggcttgatggtgaaacaaacaatatggaactccttaagatgcttataaggatcttcacctgcaagaccatgaaacttgggcagcanatgtattagtccagtcttgagaacatatggaacacccttatcaggatattgaatgcataagctntcataagtgaaatcaagtgcagccatctccctaagagtcctatcac

SEQ ID NO: 17146 - DNA, 405 bp, Glycine max
  unsure at all n locations
gaagctagatcttagctacacatacctctctaatatgcttatctcacctccttgagatgagaagctagagcttagctacacacccctataatagctaagctcacccccatgacaaaatacatgaaaatacaaaaaaaaagtccctactacaaagactactcaaaatgcctcanaatacaaggctaaaaccctataatacttgaatggccaaaatacaaggcctaaacgaaggaaaaaacctattctaatatttacaaagataagcgggctcatacttagcccatggactcaaaacctaccctaaggctcatgagaaccctatggccttcccttggatctctggcccaatctacttggagtcttctatccaatgcccttggagggtaggattgcatcacctatcac

SEQ ID NO: 17147 - DNA, 208 bp, Glycine max
ttcttgttgccttggatcttcttcatcaatggagtcatttgattcttgaagatcaatggcaacagaatggagaaggaggaaaggtgattggaaacgccacttcaaggagaagatgagtcaagaacaagctcaccatcataggaagtcatggataagagtttgaaggtaggagaaaatgagtggatggagagagagagggggggggggg

SEQ ID NO: 17148 - DNA, 371 bp, Glycine max
tttcttttttgttcaattatgagtgggtcgatatatgatgcgcctgaatcggacatccgagtgaaaggttatgaccatttcaatttctcgagagcttccgttgttcaatttcgagcgtctcgatatgtgatgtccctgaatcggacctccgtgtgataacttatgaccatttgaatgtctcgagagcttccgctggtcaatttcgagcatctcaatatatgatgtgcctgaatcaaacatctgagagaaaagtatgacaatctcaatttctcaagagcttccgttgttcaattccgagcgtctcgatatgtggtgtgcctgaatctgatatccgagtgataagttatgacaattttaatttctccagagct

SEQ ID NO: 17149 - DNA, 414 bp, Glycine max
  unsure at all n locations
ntcgagaatntaaaattgtcataacttttctctctgatgtccgattcatgcacatcagatatctagacgctcgagattgaacaatggaagctctcgagaatttaaaattgtcataacttttcactcggatgtccgattcaggaacatcagatatctagacgctcgaaattaaacaacggaacctctcgagaaattcaattggtcataactnttcactcgtatgtccgattcaggcgcataatatattgagaagctcgaaattgaacaacggaagctctcgagaaatttaaatgatcataacatttcactcggatgtccaattcaggcgcatcatatatcgagacgctcgtaattgaacaatggaagctctggagaatttaaattgtcataacttttcaatcggatgtccgattc

SEQ ID NO: 17150 - DNA, 382 bp, Glycine max
  unsure at all n locations
agcttgtctcctctgagttttccgactatgctcttgtgtggtggaacaagctacaaaaggagagagcaagaaatgaagagccaatggttgatacatggacggagatgaaaaagatcatgaggaagcggtatgtgccggctagttactcaaaggacttgaaattcaagctccaaaaactaacccaaggcaacaagggggttgaggagtatttcaaggaaatggatgtgctcatgattcaagcaaatattgaagaagatgaggaggtaactatggctcgatttcttaatggtttgactaatgatatccgtgatattgttgagctgcaggagtttgttgaaatggatgatntgcttcacaaagcaatccaagtggagcaacaatt

SEQ ID NO: 17151 - DNA, 404 bp, Glycine max
  unsure at all n locations
tactcaagcttgaatcgacatccgtgtganaaggtatgacgatttgaatatctttagatcttccgttgttcaatttcgagcttctcgacatattatgcacccgaatcggatatccttgtgaaaagttatgactatttgaattttccgagaatttccgatgtttaatttcgagcgtatcgatatattataagcttgaatcggacatccgtgtgaaaatttatgaccatttgaatttctcaagagcttccgttgttcaatttcgagcttctcgatatgtgatttgcctgaatcggacatccgcgtgaaaagttatactaattgaatttcgcaagagcttccgttgttcaattttgagcgtctcgatatgtgaattgcctgaatcggacatgcgtgtgaaaagtata

SEQ ID NO: 17152 - DNA, 355 bp, Glycine max
ttcttgttttattttaaaaccaaggccaccatcttttgtgcaatttgattgcatgttgactttggtagcatgaaacatctcatcacataagaaggaatagcttgcaccactgactttattaggccactcatcctgcttttgaaaacgtcttctccttccaacctttcagcttcttccaaactctatctctagcaaaattaaacacttgagtctttgatctccccaaaatggttggaagacccaaataatttacatgtctctccactgcctttaccccataacttatcaagttcatcaattctggtactagaacacatttggatacaagagagctaagatttctctagattgatcc

SEQ ID NO: 17153 - DNA, 426 bp, Glycine max
  unsure at all n locations
tatactcnctccatcccataataatagtcgtgtaagaaaataattattgtcccaaaataattgtcattntagctcttcaatataatattaattgttttttttcacttatatcccttataatattaatgatatggactacaaaaactaaaaatgaattaatgatgataaggttaattttgtaaaattattattctttttcatttgcttattagttcttcttggtctgagtaaacaaactggtatgggacgacaattataatgagatgaagggagtataaactctcatccgtggtgcatacagacacacaatttcagttcaatgcctttgtttcctctttcttaagatggtattggagcctatcctaaatctattaccgataacctaccatattatccatgcaccanacccaaaaagtactgggcgtg

SEQ ID NO: 17154 - DNA, 481 bp, Glycine max
  unsure at all n locations
tagaaaatntatttcacgagaacatatnagtaaatttaatatttttatgcttacatagataatataatactactatacgactattaaaggagtgtgtgtaagaaaataaataaattaatgtgcacaagagttgaacacaagatgtttttattgagggtattcaactttactagttgactntaatcgtcattgttgccttgtttagagttagatgcttatgtgaggaaatgggagatattttatttatttaatttaagataaagtctttccgttgtttactcttgaatcttgatcaatgataaagaacaaatttggaaattcgaagaanaagtaccaaaaacacctttntttcgtgtattggattatgatttaaaaaaatctggtaatataatgtaatatttaattaagaattttaggaatttttttanaaagttaacaaaatgaatttntataactntaaaaaaatctttagatattaaaa

SEQ ID NO: 17155 - DNA, 369 bp, Glycine max
  unsure at all n locations
attgncttatcatatgaaaattatatagtgattacattntacacatatatactataataatgagtatanttttaaaaataaagaatctaggttcatgaatcgcaaacagattcctaaagtatacttaagtaaatatatatcatatacaaaattataatctaaaatgagttgtcgtagttgtatcattaaataaatttataaatttatactacaaatcaggatcttatctatatattccaaacatgaatgaatatacactaattatattgaaaatgcaaactacaaggcattcaaagcacaaattaattcaatatttatatcacaatacaccaaaattcaaccaaaaattactgcataataatttcaata

SEQ ID NO: 17156 - DNA, 395 bp, Glycine max
catgaaaagacctatgccctttcttttaacttctccaaatggggagtctcaacagccttttgctttcccggagagtagtagagtcactctgaccttccttctcctggcacataatccttgggcttgtcagctcatcaccactcttggggagtggacctgagcaaatatcaatctttcccttgcctgagaatcctcatggataccaagctctaagttcttagagaaagcctcatagaacttggttgaatcctccttggtctctgtcattacatagaacagctcaatgcacttcttgaccaagctcttacggatgaccttcaagatcttgatctggtgcaacatttcatcttgaaatgctgagtgggagatcttcagaatcaacaataccccttgac

SEQ ID NO: 17157 - DNA, 403 bp, Glycine max
  unsure at all n locations
ttcngttatatttttgaagtcaaaatgcaattccaaagcagtatcatttaaaatatttaacaaaaaatattattaaatgagctaattaagatattaatataaaataataatgaaaaaatcttgctttctaattttacgacaatttaaaaaattataataagtaaaatataagtcgcatatataatttaataaactattaatttggcctttntaaatatttatttgacattgattntgcttttaatttttagtgagatggagtgagtcttttaaacattgaaaagtattaaaatctttttgtgatatggagtaagtcttttattntaattatgtaagtttgctccttacatataatagaaatggtttttctcatatattttttttatgaaatgcgagatgagtg

SEQ ID NO: 17158 - DNA, 366 bp, Glycine max
tatataacactcaagcttgtgggaagacactgatcgaatcatcatcatcaccactcttgatacagctctctctagacgcgtactttgcacgcttccttccgcacagctattcttgcactgcggtcgttggctctctatgctctcgggttgctctctcttctttacctcctacggtgcttgatatacttaaagatggtaaaggcggagttcttgcatcccgtatgggttaactacctattcgctccgtggatatcgtggattctattgcttcaatcggagccattcgtggcgccaacaacagcaacctacttggttctgtggagggtgttcacggtgccggtggtagtgctggacgtgaagatctac

SEQ ID NO: 17159 - DNA, 415 bp, Glycine max
  unsure at all n locations
atctnatgtatgaagagttcaaaatgagtatgatgggagaattgaagttcttccttggactttaaatcaagcaagcggacgaaggaatatgcatacatcaaaccatgtagtgaaaaaacttctgaagaagttcaaggtggacgatgcaaagcatatgaaaacccccatgcatccaaccattgtacttggactggatgatgaatcaacgaaggtggatgaaaatacatgcagaggaaatatgatatctcttttgcatctcactgcgtccagccttaacattatgttcagtgtatgtctctatgttagattccaaaaggaaccaaggaaaattcatttatatgatgttaaacgcatatttagatatttgattgaaacttctaaccttggtctttgctttaagagagaaatcgaatac

SEQ ID NO: 17160 - DNA, 469 bp, Glycine max
  unsure at all n locations
ctntanatgagcttcacctttctcgcgactatcatgttgtctgtctcgtgtgcttttagtttatcctanatttatcaacgattagtcaacacaaagttaccatctcaacttcaaaatattttctgctttaaaaacacatcaaaatatatgctactttagaaaatcaagatcaattatatttattttaataatatttttgtttattttcttagtatagactatatatatctttaatcagaacattatgaagtatggaggataaaattttagctntgaatctttaacacatttacatatccaaaaatatattcattattggtatcttatgtgaaatattntattaatttacaatattatactgtaactcctttaatgaaaatattntaataaaagaacatgagaccagcttattaaaaattaaaaaatggaaacttatcacacttaaccaagctagtcaaaacaaatatta

SEQ ID NO: 17161 - DNA, 417 bp, Glycine max
  unsure at all n locations
agcttgtatcgttcattcgtgtgaaaagttatgaccatttgaatttctcaagagcttccgttgttcaatttcgatcctctcgacatattatgcacccgaatcggacatctgtgtgaaaagtcatgatcatttgaatttctcgagagtttccgatgtttaatttcgagcgtatcgatatattataaccctgaatcggacctcagtctgaaaagttatgaccatttgaatttgacgagagcttccgttgttcaatttcgaatatcactgtatgtgatgcgcctaaattggacattcgagttaaatgttatgaccatttgaatttctcaagagcttccgttgttcaattctgagcgtctcgatatgtgattcgcctgaatcggacatnccgtgtgaaaagtataaccattngaatttctc

SEQ ID NO: 17162 - DNA, 412 bp, Glycine max
  unsure at all n locations
ttctntttggtgtcgagaagaaataacatgtttgtcatcatcaaaaagggggagaatgtgaatgtatgtatacatgattttgatgatgtcaaagaagaatctaacaaggctacttcaaatgataagcatttgcttcaagaataattcaagattgcttcaacaaacaaatccttgtttcaagattcactaaagaccaagccttgccttaaaacaaagtgctttcaagacatgcaaggctctggtaatcgattaccaggaagtgtaatcgattacccgaagacagggttgagaaatagctgttgaaaaaggttttgaatttgaattntcaacatgtaatcgattaccatatgtctgtaatcgattaccagcaacgaaactttggaaattcanattcaaaagtcattaacccttc

SEQ ID NO: 17163 - DNA, 451 bp, Glycine max
  unsure at all n locations
ctaattntaatatgatacattattgaaagttttagctnttaaatagtcattattataattattgttttatataataatgtaaaactataataaacagaacttggattataattttttacatctacagtaaattctatttgtaataattcatacacatacacaagttaatttaaaccattattgagatatggtttttatattacctaaccggcactaggttatacgagagcatcattctcccaactcattgtgcaagttaatcaatttcctggtttttaacaaagattcaatgaaaatgatccatcatgaaaaagttcatatttaaaaatgaaccaaccgtattttcacaaatgagaaatctactaaagttttgaattaaccatcaacattgtaaaaactcaaatntgatntgngctgctaggatgctcaccgaacttatattagccatcat

SEQ ID NO: 17164 - DNA, 390 bp, Glycine max
agcttggacaatggcagtgaaatcttgctaaaatcctagataaatctcttgtaaaacttggatgtcgcagaaaagaacgtacttcccgcacagatgcgtcgtaaggaagagaagtaataacatcgatctttgccttatcgacctcaatacctctactagagactgaatgccctaagactatacctccatggaccataaaatgacatttttcaaagttaagaacaaggttagtctcagcatcggtcaagaactctacagaggttatccaaacatgcatcaaaggaagaaccataaacaatgaaatcatccataaacaccttcatacaactctataataaatcagaaaagatactcaccatgcacctttggaaggtgccaggagcgttgcat

SEQ ID NO: 17165 - DNA, 399 bp, Glycine max
  unsure at all n locations
agcttcttatcctaggctcatcttggtggtgaagctccttcttccatggcttactccctagtggatggcgtctcctctcacttcttctcctttgtcttccgctgcatctccatggtgtaaaatcaccattgaaggacctcattgaagctcaaagatccagcctccatagaagctccacaagcaagcttccatcactgaggacatggaaaggatgatgttcgtcaccctttggggaatgttctgctacaaggtgatgtccttttggcttaagaacgctggggcaacctaccaacaggctatggtagcattattccatgatatgatgcacanaagaaatgaagtctacgtggatgacatgattaccaagtctaaacccgaggagaaacatctcatcaactt

SEQ ID NO: 17166 - DNA, 400 bp, Glycine max
  unsure at all n locations
tatacctgatgagaataacttaattgataatatatacgtttattttgtagataagatctggatttgattatcacataatatatgtttagaacagtaatagattttaagtgtgattaaatcttaaattttaaatgtaagattagtcttataactaccacaagaatctaaaatttgtgaagatcctttggagtcctactctatgagctgtgaactcaatggttagattacagattcattatattgcgaatattcatgttgtgtgatggtctacaactgtacctacatatgaggaaaataaattagagatntctttatctttcctactcttatgaaatagatcctttatataatatgagacacctaagtacattatcatatttttctctcatattattcccag

SEQ ID NO: 17167 - DNA, 355 bp, Glycine max
catgcaacaattgttagccgtggctatacgagacatcttgccaaacaaagtcaggttcaccataactcgcatgtgctttttcttccatgctatatgtagcaaagtgattgatccagtaatgtttgatgagttggaaaatgaggccgcaattatactgtgccagttggagatgtattttccccctgctttctttgacatcatgattcacttgattgtgcatctggtcagagaaatcaaatgttgtggtcctgtttatctacggtggatgtacccggttgagcgatacatgaagatcttaaaagggtatacaaagaatctatatcgtccggaagcatctattgttgagaggtacatt

SEQ ID NO: 17168 - DNA, 464 bp, Glycine max
  unsure at all n locations
ctggagaaccaagccaatcagaatgctagacgaaatatagatggttatatatgtaacaatggtggtaatgacggaccgaggcataaccgggttgagggagtaaagctcaatgttcctcccttcaaaggtagaagtgatccagatgcctacctggactgggaaatgaagactgagcacgtatttgcctgcaatgactacactgatgcgcaaaaagtcaagctagcagcagttgaattctccgactatgcccttgtttggtggcataaatactagagagaaatgttgagagaggaacggcgagaggttgatacatggactgagatgaaaagggtgatgagaaaaaggtatgtgcccactanctataacagaaccatgcgacagaaactccaagggctgtcccaagggaatttaaccatggaagaatattataaagagatggaaatggcgttagtgagggtcaacat

SEQ ID NO: 17169 - DNA, 411 bp, Glycine max
agcttagtaaagttaagcactaacaatctccccctttgggaaattttgtctaaaacatacttagacacttcctgagcaggtacgagcagttatgcaagtgggatcagcaactttcattatcagagtaatcaagcacagcggaaattctgcatgttgcaagtcgtttccaggatgtcaagacatctcacatgacatcagctttctgcttctgctccccctgtctccatgcttactgcagcatcttctaacagctactagtcttttccaggatgtcaagacatctcatgtgacatcagctgctccccctgtctccatgctcttactgttgcatcttttatcagctactagtagcttacaccagtcatcatcagcagcagcagtctccccctcaaatcatatacatacaactcc

SEQ ID NO: 17170 - DNA, 489 bp, Glycine max
  unsure at all n locations
tactcagcttcctcaagatccttttatctccctgttgaaatctcatntgtccattagttgngggtggtaaggtgtggaaattctgtgcacgaccccatactttntgagcaaggcatacatggatctattacaaaaatgggtgccttgatcactaacgatggctctagagactccaaacctgcaaaacatattagatctaacaaaatccacaacaaccttagcatcgttagttctggtggctntaacttccactcactttgaaacataatgaacaacaaggagaatataaacaaaaccaaaagagacagggaaaggccccataaagtctatacccaaacatcaaacacctcacagaacaacatgggttgttgaggcatttgttgtctccatgaaagtgagccgcctgctctctgacaaggctcacaagtgctacagattctccacgcatccttgaagatggtgggccaatagaaaccacagtcaagcact

SEQ ID NO: 17171 - DNA, 418 bp, Glycine max
  unsure at all n locations
attcagctcggacccgggatcctcttagtcacctgcagctgcagcctttttgttcttttatatcagagggactgatggtcactatgaatgacaaatctcttgagataaaggtagtgttgccatgtattcaaagcccgtactaatgcatacaactccttatcataagttgaatagttaatggtaggaccacttaactnttcactaaaataagcaattggatggcctttttgcatcaacacagccccaatcccaacatttgaagcatcacactcaatttcaaaagatttttgaatgtttggcaacgcaagtatggnggcattagctagctcttgctaagatcattgaaagctcttcttgtttctctcgccatatgaaccaacatttttttgacacttcattagaggtgctgcaatgtgct

SEQ ID NO: 17172 - DNA, 444 bp, Glycine max
tgatatttgtgccatagtaggccagatattgattatggtatgggtttggtaagcagatatatgaatgatctaaggacttctcatatggctgcagtaaagagaattttgagatatgtgaaaggcacacttgattatggcttcttattctccaaagcaaatcataatcaaggaataaggttaattggtttttctaatgcagactatagtggtgatgtagaggacagcaaaagcaccactagatatgtcttcaaattacttggatcaacaatctgcttgagttctaagaagcaagaagatgttagactttcaacttgtgagttagagtacatggctattgtctcagcagcttgtcaatcagccttgttggagtccctgttgtagaattgaatattcagcttgattcagttgttcaacttaatatggacaacaagtctgctatatgtc

SEQ ID NO: 17173 - DNA, 411 bp, Glycine max
  unsure at all n locations
ttcttgtatcatataaagtggatccgaggaactctcaaggacttggtcaagatgtctataagctggttgttggagttaataaatttagtactaatttctttggactgcagctttttccgaacaaaatgacaatcaatctctatatgttttgttcttttgtgaaatacaggattagaggtgatgtgaagagctgcctgattatcacaatacaactttatttgctgaacatcacanaattttaattattgaagttgtttaatccacaacaattcacaagtaacaagagccatagctctatattctgctnttgcacttgatcaagcaaaaacactctgtttcttgctttttcaagagacaatatttcctccaaaggatacaccatatccagtggtggatcgcctgtctatggga

SEQ ID NO: 17174 - DNA, 459 bp, Glycine max
  unsure at all n locations
ntgaaatgggctcacatgtaggggtgagttgcgagataaatctctcgatataattcaacctgcccaagaaacctcgaacctgcttctccgtgcgtggttccggcatttcaataatggccttcattttctcgggatctatcgctatccctttctgacttacgataaatcccagcaacttccccgactttaccccgaaggtacacttggttgggtttagcttcagttggtatttccgcaaccttctgaacagcttacgcagattgacgaggtgttcgtcctcagtctgagatttggcaatcatgtcatctacgtagacctctatttccttatgcatcatgtcatggaacaacgccaccatggcacgctgataggttgccccagcatttttcagcccgaatgccatcactttatatcagaacgtcccccatagggtgacgaaagtggtcttctctacatctt

SEQ ID NO: 17175 - DNA, 410 bp, Glycine max
  unsure at all n locations
ttcttgatggattacttgatgccttggtcaacctagtaactcagcttgacatgaatcagaaatatgcatctgcacctgttgcaagagtctgtggtctgtgttattctgtagatcaccatacagatttcatccttctttgcagcaatatggagtcaatgagcaacctgaagcttatgctgcaaacatttataatagacctcctcaacagcaaaaccaacaatggcaaaataattatgagctttcgagcaatagatacaatccaggttggaggaatcatccaaatctgagatggacaagtcctccacaacaacaacagcctgtccctcctttccagaatcctgctggtccaagcaagccatatgttcctcctccaatacagcagtagtcacaacanagacaacaagcaactg

SEQ ID NO: 17176 - DNA, 398 bp, Glycine max
ttcttgtgacatgaggccattaagtgcctctgccacaatgttataaagaagaggtgatagagggtctccttgccttagtcctttctgaggtaggaactcagctgagggactaccattcaccaaaaatgaaacagatgctgattttagacacccctcaatccattgaattcatttgctgcaaaagcccatcctacccatcatataagtgagaaactcccaagacacaaaatcatatgccttttcataatcaaccttgaagacaatgcaaggcttttggcatcttttggcctcttcaactacctcatttgtagtcaccacgctgtgtagcatatgtcttccttctataaatgctgattgcctctcatgaataataaaaggcatgaccttcttcaatctat

SEQ ID NO: 17177 - DNA, 405 bp, Glycine max
  unsure at all n locations
agcttcttatcctaggctcatcttggtggtgaagcttcttcttccaaggcttattccctagtggatggcgcatcctctctcctcttctcctttgtcttccgctgcatctccatggtggaaaatcaccattaaaggacctcattgaagctcaaagatccagcctccatagaagccccacaagcaagcttcctaaggtgttcctcctcagttttagacttggcgatcatgtcgtctatgtagacttcgatctctcggtgcatcatgtcgtggaacaaagccaccatagcccattgataggttgccccgacgttcttgagcccaaaggacatcaccttatagcagaaccttccccacagggtgacgacacatggtctnttccatatcctctggtgccatctttatctg

SEQ ID NO: 17178 - DNA, 482 bp, Glycine max
  unsure at all n locations
tgctaacccatggaagctcctaatatctcccacactntnntgggtggtctcattcttggatggccttgattntctcagggtccacttggaccccatttctaccaactacaaaacctaagaaaactatattatctacacaaaaggtacacttctctatatttgcatagagggtgtttttcctaaggactgaaagaacttgcctgagatgtcctaagtgatcatctaggctcctactgtacactaaaatatcatcaaaataaacaactacaattctacctaggaaatcccttaagacatgatgcataagcctcataaaggtgcttggtgcattagtgagcccaaaaggcatcactagccattcatacaaaccaaacttggtcttgaaagcggttntccactcatcaccctttttcatcctgatttggtgataaccacttttaagaatcaattttgaaaagatattggcaccatgcaactcatca

SEQ ID NO: 17179 - DNA, 415 bp, Glycine max
  unsure at all n locations
agctnttatttcaataaataagtttaaataagttggcccataatcaatataaagtaatggaaaaaaaacataatcaaacatctatttgtctttatcaagtctatttcaagtctagtattaaaattcaatatttttttttatataatgttactctgtaataatttttatatgcatttattatcaaaattaaaattcattntaaatgtattgaaatagagtaattntaattaaacatatacaatttttaattattttaaaacaatatttttaatgattntaaagatattaattntcattatgtgataatattaaagattaatctcatcgtataataaataaaacactntcatttagtataattaaaattatatattattatcattattattatcaccattaaaattataaaacactt

SEQ ID NO: 17180 - DNA, 421 bp, Glycine max
  unsure at all n locations
tagtagggaatctatccttcctaagatggagttctttccagtcactgtcgttaagaactagctcttttcttcctctattgcctttagttgaatacacctttgtgtggttctctatttggttcttaaccctctcatgcaacttctttacaaactctgacctagattccctttcttgatgtataaacaaagtgtccagtgggaggggaataaggtctaacgatgttagggaattgaacccatagacaacctcaaaaggggattgcttggtggttctatgagctcccctgttgtcggcaaattctacatgaggaagatactcatcccaagacttatggttgccttttagaagagcccttganagggtagataaagacctattcactacctctatttgcccatcagtttgtggatgacaagtagt

SEQ ID NO: 17181 - DNA, 421 bp, Glycine max
  unsure at all n locations
agctttttcagtttcataaagcttttggactaattaaattaatactttcaaaattaaagataaatatttcatatatcatcatttttatatttttattattttaaaaatgaccataatatttttatgtaaattaaactagttttctaggtttttaaccataatatatgtatttttcaaaacttccatttcaaagaaaataatatttattattttaagttcaaaactcaaagaggaaaaaatgcatgcaaacaaattcaaataataagtattggctaaaatatttttattatgaaattaaattttttaaggataaataatttcattntttgtaatatttgatattttgattnttatttgatccttanaagtaacattgtaacaataaaataatatttttcanagtttatgaaaaaataatata

SEQ ID NO: 17182 - DNA, 387 bp, Glycine max
agcttttataggtgaaatcaggtgcagccatttcccttatagtcctctcacgaggtggaggttgtgccatgttctcagaatgtgcaaaatcagaatgctcagaatcagaatgctcaaaattataatgctcaagattaggatgttcaaaatcaccaataacagaatgcacagattcaccagttatacaatgctcagaatgatcaaaaggtataaaatgatgcctaactgaaattctgatactgaggacagatgtcgtacaggatgtcacgacatcgcgcttcagaacatgcagattgtatatgacagtatgaacagattatacaagtaaataacacaagagaattgtaacccagttcggtgcaacgtcacctacatctgggggctacc

SEQ ID NO: 17183 - DNA, 464 bp, Glycine max
  unsure at all n locations
nttccacttccacacaaaaatgtaattctaattctatcacttgtttntactgtggaagaagaggacatggcatatcaacttgctacttcaagaaaaattatagtaacattaaaatgatatgggtcccaaaaggatcctcagtttatactaacatgcaaggacccaataaaatttgggtacctaagtcaaaaacttgattatgcaggtatctttgagaaagaagtggtacatagatagcggatgctcaaaatatatgactggagatgcatcannatttacacacatatctccaaagaaaagcgggcatgtaacatatggtgacaacaacaaaggtagaattcttggagtgggtaaaataggtacannatcttcanactccattgaanatgttctacnttgtgaaggccttaagcacagcctgcttagcgttagtcaactatgtgacanaggctatctagtatcat

SEQ ID NO: 17184 - DNA, 416 bp, Glycine max
  unsure at all n locations
agcttgttcattttatattctgatgagggtgttccatatgttctcaagactggactaatacatttgctgcccaagtttcatggtcttgcaggtgaagatcctcataagcatcttaaggagttccatatcgtttgttccaccatgaagccctctgatgtcctagaagatcatacctttctaaaggcttttcctcattctctggagggagtggcaaaagattggctatactaccttgctcccaggtccattttcaactgggatgaccttaagagggtgttcttggagaaattctttcctgcatctangaccactgccatcagannagacatttcaggcatcaaacaacttagtggagagagcttgtatgagtactgngaaagattcaagaaattgngtgcaagctgtcctcaccacca

SEQ ID NO: 17185 - DNA, 477 bp, Glycine max
  unsure at all n locations
gcttcatgatgatgaatcaagttgattcaagaagttntgatattgtcttgttgttgacaaaaaacccaaagaatgatttcgagattaaatcaagatcaaattcaagaatcaagagaagtttgatttcaagattcaagaaaagatgaattcaagttccaagagaagaaatcaagaagacttcacaatgggaagtattgaaaagattttttaaaaaacaaacatagcacaattttgtttttcaaaagagttttcacaaaattttctatgttaccagagtttttactctctagtaatcgattaccagtttcctgtaatcgattactagtggcaaagtttgatttcaaaagcttttaactgaatatacaacgttccaattgatttcaaaatggtgtaatcgattacaagatattggtaatcaattactagtgcatctgaacgttggaattcaaattcaattgtgaagagtcacatcctttc

SEQ ID NO: 17186 - DNA, 480 bp, Glycine max
  unsure at all n locations
nttanattgaatntacaatgttccaatttatttcaaattgttgttatcgattacaagatattgctaatcgattaccagtgcatctgaacgttggaattcaaattcaattgtgaagagtcacatcctttcataaatagctttgtgtaatcgattacaaggatttggtaatcgattaccagtgacaagttttgaacaaaaatcaaaagatgtaactcttccaatgattttcaggtttttctaaaggttataactcttccaatggttttcttgaccatacttgaagagtctataaaagcaataccttgacttacatttaaaagaagaacttacaatacttacaacctttacaaacaacttttccacatattcttttacaacctttgaatttcttcttcttcttcctttgcaaaaagctntctaaactnttctggttttccaaaccttgaaaataaaagtgtgctattcatctttttcattccc

SEQ ID NO: 17187 - DNA, 378 bp, Glycine max
  unsure at all n locations
tgtcctcggtgacgaanacaatagaataagccccttcgattctttcacaggcgtcatctattcgaagaatgaagggtctgtgtttggaggtggcgatgaggtggaggacaacctcggtgtcagaggtggtgttgaagatggagccgttgtcttcgaggttggttcggagggtcttatagttgacgaggttgccgttgtgggccacgccgacggagccgaagcggtaaccggcgacaaagggctggacgttattgagcatggattggccggcggtggagtagcggacgtggccgatggagaggctgccggagagctggtctagttttgattggttgaagacttctgagacgaggccaacgccggtgatggattggatga

SEQ ID NO: 17188 - DNA, 344 bp, Glycine max
  unsure at all n locations
ttctttttgtgatgatcttagaggaagaacataggagtaacttgagcatccaccctggtgctaccaagatgtatcaggatcttaagacaatgttttggtggccaaacatgaagagaaaggttagtgagtttgtgcatgcatgtttagtctatcagaaggctaagatagaacatcagagaccctcaggtaagctgcaacccttagagataccttagtggaagtgggacgatatctccatggatttcattgtagggatacctangacccccaaaggtgtagattctatttggtttgttgttgaaagattaatcaaatctactcactttatccccatcaatatcaag

SEQ ID NO: 17189 - DNA, 458 bp, Glycine max
  unsure at all n locations
tgcatagcagtttctactacttaagctgttacatagttgtagtttagttgttgtactcaaagtctttggatgaagcaacaacttgaagactttggagtaaaccttgatcacattcctctaaaatgtgacaacacaagtgctaccaatctaacaaaaaacccagtcaagcattctaggactaaacacatagaaataaggcatcattttcttagagatcatgtgttaaaaggtggctgctgcattgagttcattgatagtgagcatcaactagaagaaattntcactaaatcttttgctagagatagtttttttattagaaatgaactangcatgttagatgcatctagcataaaatgacattctgtttgcatagtgtgtgatgcacattgctactcatatcatttgttntgtttagcttgtgtcccagtttattgattcatatgcatactcattagtag

SEQ ID NO: 17190 - DNA, 387 bp, Glycine max
tttcttattattgtacgaaatggacaaacatgaaccgtgttcttgaagaagtgggtctgcctcaagaacctcatttttctcattataggacgtatagcaatggtggaaactaatgttacgtagaacggaaagcgatctcccatgtttgctcctaataaagggttgcacaaaggtgatttgctattaccttacctctttgttttaggtatgaacaaactctcccacattatcttgaaagcagtggaagcttggaaacctttttgtatgggaagaaagggccccctcatctcgcacttcatgtttgcggatgacttattattgtgtggtcaggcttctactaagcatatgaaatgtactttggacactatgcatttgtttggcgagatg

SEQ ID NO: 17191 - DNA, 443 bp, Glycine max
  unsure at all n locations
acactataatactcagcttgaactattggtgaggtagactagganaagagaggttggttgtttaattctactcaatatcctcaatattagaaaataaatcaataaaataagaatttaacatgtccttaatttgatgatccttctctatccattgcccttaagtatttcttaacataagaatcttatttctttttcttatgttgatagtcttgagatgctagaatctcgtgtttctgtctccatcttggatccacttggttcttgattgttgaaaccaatcaagctcctcctgcttaaggattgcatcatactcatttagacccttttccattcacaaccaanattggttggatctcccttcataaatctttttttggatctctcccaacctattaatgactctctgctttctatatctaatgcaaccaaacacctttctcttc

SEQ ID NO: 17192 - DNA, 388 bp, Glycine max
ctgcagcttttatttattagatgaagatgaatccgtggccacctcatggactcctctaaggacaatagcatcatttcttgcactgaattgttaggagttggaagccatcttctcaatcaaattcctagcctcagcaggggtcatatcaccaagagctccaccactagcagcattaatcatactcctctccatgttgctaagtccctcatagaaatattgaggaaggagttgctcagaaatctggcggtgagggcagcttgcacacaatttcttgaatctttcccagtactcatacaagctctctccactaagttgcctaatgcctgaaatgtcttttctgatggcagtggtcctagatgcagggaagaatttctccaagaacactctt

SEQ ID NO: 17193 - DNA, 448 bp, Glycine max
  unsure at all n locations
tgcagaatgcatggtttggcactncattacgttgtntcgttcggctccaagtggntagaaagtcttctgtttgccaattgcatttggaatggcctgttcccgaaaatacttccttctcttgagcttcctgatcatcctgatcttcttcagccgtttggggtcaacaactttcttgcttttttccaatatctctttccttccctccttataagcttgaatggttttacttctctgatcatctggtaataaagccaacttggaaaatatcttgggactcactatctcaagtttctcagtaatttccttgaatgctggaacaaggccacgccttatgaagcacccttctataagccgcatcgtatttaactcggggagactatgagcatcttttaactccagatcctagcaaaatggtgagtcatttaaccacatcctgagagagtgagcc

SEQ ID NO: 17194 - DNA, 342 bp, Glycine max
  unsure at all n locations
agcttattgcaatggtttgattagcatgggcagaaatgtgtcagcattaataggtaaatatgttcctcacattcctgagaaatataaggacccaagtactttctgtataccttgcattattgggaacaacaaacttgagagtgccatgctagatctaggagcatcagttagtgtcatgcctctgtccattttcaattctttatcttttggatctttgcaatctacagatgtggtgattcatttagcaaatagaagtgttgcttaccccgtangtttcatagagggtgtgttggttcgggttggtaaacttatttttcctgttaatttttatgttcttgatat

SEQ ID NO: 17195 - DNA, 364 bp, Glycine max
  unsure at all n locations
agcttttctcagtcgtttgtaaggatgatngggtgttagaaagcggcgatgcctactgtagactgtttttctcccatgtttcagttgtgtgtaacttgtattttcttcacagatggggcatgcatgatgacccttaacactgtaaccgctgagattcccatatgctgggaagtcattaatggtacaaaaaagcattgcacgcatttcatacgtctccttgcgaaacgcatcanatactacaaccccctcgtcccacaactttctcagatcttcaaccaacggacttagataaacatcaatgtcatttcctggctatcttgggcccgatatcatcatagacaacatcatgtattttcgcttcatg

SEQ ID NO: 17196 - DNA, 451 bp, Glycine max
  unsure at all n locations
actcaagcttatcttttgaaactatcccttatagacttatagtaagtttgtgtgtggtcttattctgctgacaaaaaaaatataattgtcgatgaagacgaagacaggatgcggaggactataaaacaaaacccatagtaaaggtaacgacgcaatgaggagaaaaattcttgtgcagaaaaaacacgacagctaatccaacaattatttaataataaattaagttatcaaatacactaataattaattaatgggcaaattcatatatttcattttcttgtatctcacttttatttatttattgcacaatcatatgtattactaaatccctttgttacaatttactggtattagttaattntttaatacaataaacatctttctgattnttttaatattttttaaaaattattctacttatatattntttataataattaaatcttatata

SEQ ID NO: 17197 - DNA, 288 bp, Glycine max
  unsure at all n locations
agcttcttggntntcgaagctagatttgcgtcaaggctttcaccaaatacgcatggcggaggacgatgttcataagacggctttctgcacgcaccagggacactacgaattcagagtgatgccgttcggcctctgcaacgcgccgtcgacgttccaggcggccatgaacgataccctcaagcctttcttgagaaaatacgtggccattttcttcgatgatattttggtgtttagctccgatttggacacgcacgtcacacaccttgaatccgttctagataccctctc

SEQ ID NO: 17198 - DNA, 440 bp, Glycine max
  unsure at all n locations
ntgacatcaaaatttgttttccctcttggttgttgctctattggaagacaaaaaatgattgtctacaagtacatgccctgnggtgctcttagtcaatatttgttaaattggaaagctgaagggttacaacctctggattggagtggaagacaaggctaagaattgccttggatgttactagaggtgtcaaatattctattgcatgagcaaataaaattttatccatagcaatataaaatcatctaccatttcgttgggagaagatatgcatgccaaagtatcaaactttggattggttcggcttttacgtgaagggaagaattcatgtcaaaccaaactaaaggctggaactattgtatattggcacctaagtatgttatgagggacacattgcaacaaaggtggatgtatttagtttcaatgcaatccttatgtagatg

SEQ ID NO: 17199 - DNA, 400 bp, Glycine max
  unsure at all n locations
tttcaagctttttatccaaggcaattcttggtggtgaagctccttcttccttggcttattccctagtggatggtgcctcccctctcctcttctcctttgccttctgctgcatctccatggtgaaaaatcaccattgaaggacctcattggagctcatagatccagcctccatagaatcttcacaagcaagcttccatcagctgtcttactggtttagcctcaccctctaaatntatccgatgcatacatgtggatgggctaataccaccaatgtccaccanggtccaacctatagccttcttatgcttcttgagaactgataacaacttctcctcttgctcatcaactagggaggcagatataattactgggaaacttttgttatcatccaagcaagcat

SEQ ID NO: 17200 - DNA, 422 bp, Glycine max
  unsure at all n locations
tatagganaaccattcgcattgttgccttttaatttcccttataaacccaaaactgtctcggtaaaactatgatcctggttttgttaaccgttggattttcatgaaatttggatatgttgctcgaaattcaattgggcacaccgttgggatttgcgagataatattcttggagggagaaaaaggaatctcatgaagacaatacaagtggaggtttcaatctcttctccgtctctctgacgtttgggaattctattggagcagtaggaggaataactgaaggaatctcanggaaccgctagagatgctgctatccctggctgaagacacgtgagtccgctcagaggtaagggatgagttattcacaattgggaattagtgagaacatgtgtagggatccttagagatatcaattggaatgagt

SEQ ID NO: 17201 - DNA, 382 bp, Glycine max
  unsure at all n locations
tgctcgcaagcttttgcattgcagngangacctatcatcaaagctggttgtggaggtccttttgagaactcgcaatgattgggaggcggctttcacttttttcttgtgggctggcaagcaaccggggtatgctcattcgattcgcgagtaccattctatgatctccatccttggcaaaatgaggaagtttgatactgcttggaacttaattgaggaaatgagaagaggtataactggtgcatctcttgtcactccccacacactgttgattatgatcaggagatactgtgctgtacatgatgtngcaagggctatcaatactatctatgcttataaacagtataactctcaagtgggctagatgaattcataaccttctttc

SEQ ID NO: 17202 - DNA, 364 bp, Glycine max
ttagcttttatactttatacaagaatgaagctctgataccacttgttagacaagtggcctcagatatcataagaaggggggttgaattaagatattccaaactacttccccaattataaatctatatcactttttattcaagttataaatgcccttaataatgaacttcttaaatattgattcacataaaacactctgaatatgactatatagcaataatatacaaaggagattaagagaagagaaagtgccaactcagatttatactggttcggccacacccttgtgcctacgtccattccccatgcaacccgcttgagagttccactatcttgtaaatgccttctacaagctctaaacacac

SEQ ID NO: 17203 - DNA, 423 bp, Glycine max
ctgacattagtgttgaatgcattatttgtaaacagtatctttgacagaaattaggtgcatatagagttacagacatcttggaattgatacatacagacatttgtgggtcatttcctacaccttcatggaatggtcaacaatattttatatcattcatagacgattactctagatatgcatacttgtttcttatacatgaaaagtcacaatctttggatgtgttcaaaacatttaaagttgaagttgaaaatcaactcaacaaaagaataaagtgtgtcagatctgaccgcggtggtgaatactatggcatatatgacggttcaggtgaccaacgtctggcgccttttgccaggtacctagaggaatatggaatcgtcccacagtacaccatgccgaggtcacctatcatgaatggtgtggctg

SEQ ID NO: 17204 - DNA, 406 bp, Glycine max
  unsure at all n locations
agctttgcatacattatatttaaaagaaagtagagtaattatttaatatactttctgtttagttttagattttcccttacaagttctactactaaaattgtgagacgcggccaactaaaccccgaaaagtaataaaatgataaaaagttatttttttggttagataaaaatgttctttgaaaatccaagttgttatttatttgagttcaaaattctaaatgttgtgtgacttaaataaaaatattagcatatcttgagggactaaatgacaataagtattaagtttaggaaataaactgatacagtaaggaatttcattatntacttttagggattaaattaacactatctcacacttttaggaaagaatttgnattattatttatcttanatatttaaattaata

SEQ ID NO: 17205 - DNA, 446 bp, Glycine max
  unsure at all n locations
aactcagcttacactgggcgggacagaaattggtagctggttatagtatatgttgagatcactggaaacacgaataatacctttcttatcattaacaggtgtgaagctcaaaggcagacctaagtcaccatcaacagctacaacatcaagtggacaatctacatcggttcttgccgaagcaaggccaccgatatcggaggaagccggaacgatgtagtaaatcgaatcagctcgaactttcttccccaatgcgtccagcactggctcggatgcaggaccagctagtgcctttgtgatcaaggcaaacacaaggaccaatgttaccaatgtcatcttcatttttatgtatctaattntgtgtttttgtaacttgtaatggatattgaagaagagggatatttatatataggatggngattgctctaatctatgtacccatgtgcacc

SEQ ID NO: 17206 - DNA, 310 bp, Glycine max
agcttctcgacatatgatgcgcccgaatcggacatccgtgtgaaaagttatgaccatttaaatttcgcgagagttttcgatgtttaatttcgagcgtatcgatatattataagcctgagtcgtacatccgtgtgaaatgttatgaccatttgaatttctcgagagcttctgttgttcaatttcgagcctctcgacatattatgcgcccgaatcggacatccgtgtgaaaagttatggccatttgaatttctcgagagcttccgatgtttaatttcgagcgtatcgatatattataagcctgaatcggaca

SEQ ID NO: 17207 - DNA, 444 bp, Glycine max
ctcacgcttatgatatattgatacgctcgaagttgatttacacaaactctcgacagattcaaatggtcataactgttcacacggatgagcgatacgagcgcataatatcgcgaggggcttgacattgaacaacggaagctcttgagaaattcaaatggtcataccttttcacaccgatatcctattctagcaaatcacatatcgagacgctcagaattgaacaacggaaggtcttgagaaatacaaatgatcttaacatttaactcgaatgtccaatttaggcgcatcacatatagtgacactcggaattgaacaacggaagctctcgagacatctagatggtcataacttctcacattgatgtgcgattcacgcttataatatattgatatgctcgaaattaaacatcggaagctctcgagatattcaaatggtcataacttt

SEQ ID NO: 17208 - DNA, 349 bp, Glycine max
  unsure at all n locations
tttgcaagcttttatccatttcacacgacagtaacttttttctcggatatctgattgagtcccgtaatataacgagacgctcgaaattgaatattgaagctctgaactagttcaaacgacaataactttttactcggatgtctgattgagtcccgtaatatatcgagacgctcgaaattgaatgttgaacctctgagtaaattcaaacgacaataacttttttctcagatgcttgattgagtcccgtaatatatcgagacgctcgaaattgaatgttgaagctctgatccaattcgaacgacaatacctttntactcggatgtctgattgaagtcccgtatatatcgag

SEQ ID NO: 17209 - DNA, 429 bp, Glycine max
  unsure at all n locations
tcaacattcaatttcgagcgtctcgatnatgacgggactttatcagacatccgagtaaaaagttattgtcgtttgaattggctcagagcttcaacattcaatttcgagggtctcgatatattgcgggactcaatcagacatccgagtaaaaagttattgtcgtttgaattggctcggagcttcaacattcaatttcgagcgtctcgatatatgacgggactcaatcagacatccgagtaaaaagttattgtcttttgaattggctcagagcttcaacattcaatttcgagggtctcgatatattacgggactcaatcagacatccgagtaaaaagttattgtcgtttgaattggctcagaggttcaacattcaatttcgagcgtctcgatatattacgggactcaatcagacatccgagtaaaacgtta

SEQ ID NO: 17210 - DNA, 420 bp, Glycine max
  unsure at all n locations
ctcagcttgttacctatgatgaattgcttttttagagttgnttatatcaccactaattgttctccttttgaagttgtttatggttttaacccactaactcctcttgatcttttgcctatgcctaatgtttctgtttttaaggataaagaacgtcaagcaaaggcggactatgtgaagaagcttcatgagagagtcaaagatcaaattgagaggaaaaataaaagctatgctaaacaagccaacaaagggagaaagaaggttgtcttcgaacccggagattgggtttgggtgcacatgagaaaagaaaggtttccggaacaaaggaaatcaaagcttcaaccaaggggagatggaccatntcaagtgcttgaaagaatcaatgacaatgcttacaaagttgagctgtccggtgagtataat

SEQ ID NO: 17211 - DNA, 408 bp, Glycine max
  unsure at all n locations
agcttcttcacaattttttaattagaaacacaatcaatatattattagttaagaaaaatcatacattttagcaaataacaacacatgtcaatgagtttattaagaaggatctcaatttgattctaacataatatatctttaaagaaaaacaaaattttttaagtttgattaaattttgaacttagaattaattttataatcgatctaaaagattaaaattataaaaatcttacaaaatttcaaaaaagaaaaataaaaaatccttattattaatatggttaaaaaattatatattaaataaaanattgaattcaccttcgttaataaatcttatatgaagttcaatcaataataaagtaatgacaacaaatgtattattagcttttaagggattttattcgatcacat

SEQ ID NO: 17212 - DNA, 341 bp, Glycine max
  unsure at all n locations
agcttgtctttgagatagcatgaaagacatgcgcaaagtgtgactatatgatgtggcaatagggtgtagtaagcaaatgctcacctccccctctaaaatttaattggattgggcttctaccaattcaattaaatttatttcccaacacacatatcaaatattcacttagtgcatgtgaaattacaaaactacccttaatacaaaaactagtctaggtgccctaaaatacaagagctgaaaaatcctatatttctagggtaccctacctacattatggagccctanatacaaggaccaaatataatgacatcctagtctaatatgtataaagataattggac

SEQ ID NO: 17213 - DNA, 451 bp, Glycine max
tccaagagttcggcaagcttctactattactttgattaggttacttttgtttgttgtttcattagtataataaaagcttctatattttgcatctaagatcacacaagattcctgtcggtagtctgaatgagaactttatagaacaccctttttgaattttaagtatgaatttttgtgaattcgagtaagcaagtaatgatattactgtgtaaaaaaagataatgatatatattcctctggacttaaatatatataaaaaaactaactcaatttaatgttgataatctcatgaaaaaagttaattcattttttaaagtaccatttatattaattgcataggacaaaaaaaataaggttattgaaaataaaactctaattaaataaagagtattttggggatattataattaaataggagagaattaattaaaatttacttatattttaattc

SEQ ID NO: 17214 - DNA, 458 bp, Glycine max
gactcaagcttgtacttgtacttgctattggcagattacatgcattacttcttcctttctctctcatcaacgtgagtgggcattttattctttttctataattacggggttaataagatgaaacaatagggtgatgaaacgaatagggtgtcctctcactgcttgaagcatccaatttttatttttatttttatggtagaacatattatcatatcttggaagcatcagctgtgactcggctaaaggctaccgcggtctttgagccagatgggcgccccaaatgcttgccgatgaactcaccggctaacatgagctttccgagatcaacgttggttttcaccccaagtccattcagcatgtacacaacatcttcggtagctacatttcctgaagctcccttggcataaggacagccacctagaccagcaactgaagaatcaactgcactgatccccatc

SEQ ID NO: 17215 - DNA, 445 bp, Glycine max
tactcaagctggactttgttaggcaaaatgtctcgtatgtcatgactattatttgttgcatcaagacgtgactatcatgagactttaagcttaccaacttaagatccttcaactgcacaaggctcttaatatttgaagagtatccttgtggaactttgacatgacacatacactaacaaaaactcatcttctcctttctgggcaaagtatgacaagctgaaggcaagtatattttttaccatcagaccttggatataactgcactcgtatatccatgccaactagatcttgacgagtattcaaaccatctttcatcttgccttgaatgttaaggagcgtcccaataacattatcacatacatttttctctacatgcataacatcaatacaatgtctaacatctagatcagaccagtagggaagatcaaacaaaattgaccttttc

SEQ ID NO: 17216 - DNA, 449 bp, Glycine max
tgtagacctaacattatctatgatttataagcaaaacatttctcaacaaatgataataataacttgcactatattatttttttaattatagctcaaattcaaatggttgtgattttgtatttgaagatactcttcacaaaatatattaaattgcatatataaataatggtgttgacaagaactagtaatacatcccatgaccccaccccttatctacttattccatattgacacatatgcataattaatattaagttataaacttataaaaaacaaatttttatgttggtaaaaaaatgtcaatattaacaattatctatcactaaaaaataattaaattcgactaagaaaatttaaatatttaaataaaatcaataaaagacttataatataaaatattataaaaagtataacatatttaattatatattataataatttattatctt

SEQ ID NO: 17217 - DNA, 440 bp, Glycine max
tgtgttctcccttgtagaactactaactgcagtaattgttgtagtttaactatccggtagtgatgacaatagaatcaatgccttcacctcatcatcaaatttaatctgcactgattccaactgggcaagaatagtattaaattcattaatatgatcagttacagagataccttctcccatcttgaggttgaacaactggcgcatcaagtatactttgttggctgtcgacggcttctcgtacatatctgataacgccttcattaagcctgtagtagtcttctcgtttacgatgttgaacgcgacgttcttagctaatgtcaatctgatcacgctaagagcttgtcgatccagcaagttccattcttcttgcttcatgtcgtctggcttaacccctgataagggctgatacgacttcttttgatatagataatcctctatct

SEQ ID NO: 17218 - DNA, 447 bp, Glycine max
  unsure at all n locations
tgagaatggaggatttccttgagggtcctctcttangcatttatggaacacagttccaaactcaaaaatggaggacacatgaatgacaacgcaattcattcatggggctccgaaaaagggtaagaatggaggatttgcttgagggtcctctcttaggcaatcatggaacacaactccatactcgaaagtggaggacccacgaacaggcctaagcaataacattcatgtggctccgaaaaaggatgagaatggaggattgcgttgagggtcctatcttatgcaatcatggaacacagctccaaacttgaaaatggaggtcacatgaatgacaacgcaattcattcacggngcttccgaaaagggtgagaatggaggattgccttgagggtcctctcttangcaatcatggaacacagctccaaactcgaaagtggaggacacatgaac

SEQ ID NO: 17219 - DNA, 438 bp, Glycine max
  unsure at all n locations
tgcacttcttaactntcctcaagaatttcagcctctttcctacttagactttttagctttgggagccaagttatcccttctgttctagacttcaaccacttgtgatagtcgtcgatgacgccattgttacttcccctaagctccttattttttgatgcaatcctaacccgcaagggcattggatagaagactccaagtagattgggccagagatccaagggaaggccctagggttctcatgagccttagggtagatttcgagcccatgggctaagcatgagcccgtttatctttgtaaatattagaataggtttttcattcgtttgggccttgtattttggccattctagtagtataaggttttagccttgtatttcgaggcattntgattagtctttatagtagggaattttttgtattttcatgtattttgtcatg

SEQ ID NO: 17220 - DNA, 399 bp, Glycine max
agcttgtatggtttttgtctcacgattgtcacatgctcatgcaataattgttagtcgtggctatacgagacatcttgccaaacaaagtcaggttagccataactcgcccgtgcttttccttccatgctatatgtagcaaagtcattgatcctgtcaagtttgatgagctggaaaatgaggccgcaattatactgtgccagttggagatgtattttccccctgctttctttgacattatgattcactctattgtgcatctggtcagagaaatcaaatgttgtggtcctgttcatacacataattcaaattcattaatatgtaatgcatatattggatgaaagctttgaacatggaacttatggcagttcattctatattgttgcaagtactcctacttct

SEQ ID NO: 17221 - DNA, 399 bp, Glycine max
agcttttatcaaacaggctgaagaggataatgccattcataattgatgaaagacagaccgctttcatagctggacgacagctgctacacagtgtaatcatcgctaatgaaacagtggacgaagccataaggggtcaaaagacatgcttggtgttcaaagtagattttgaaagggcttacgactctgttttgtggaactttttactatacatgctgcgaaggttagggttctacaataaatggattcagtggattgacggttgcctcaaatctgcctcggtctcggtgttggtaaatggaagccccacctcagaattcatccctcatagaggccttagacaaggtgacccactagcgcccctattattcaacattgtagatgaagccttaatgtgtctca

SEQ ID NO: 17222 - DNA, 385 bp, Glycine max
  unsure at all n locations
tttcttttggtatcatggtagccatcagagaagacattctatttccactcttatctgtctgcataattaatcctttcgcagaatgatataccctacacttcccatgttgaatcaaaatagtcaagcctttttcttgaagttgtcctatgctcaccagaaattgcctgagtaaatccactcacttgcataagaatgatacctttttccacaacatccattctggtgttattgccaagttttacagtttggctaaagctttcatccagttctgagaaccactccttgtttccaatcatatgattgctgcaaccggagtcaaggaaccacacttcttccattntgtcttgctccaggtcaacataagacattaataaaaaatctttca

SEQ ID NO: 17223 - DNA, 430 bp, Glycine max
  unsure at all n locations
tctggtgggacatcttgacttgcttttcaatctgacattttccacagattctgccttcttctattttcagattgggaatgcctctaacaacacctttgtcaatgattttcttcatgcctcttaagtgcagatgtccaaatctttgatgccatattctgacttcatcttctttggaggatagacatgtggaggagtagctggtttcttgaggtgtccataggtaacagttgtcctttgatctgctgcccttcattagaacttcactcttctcatttgtcaccaagcattctgactttgtgaagtttacattgaatccttcatcacacaactgactgatgctgatcaggtttgcagtcagtcccttcaccagcagtactttgttcagactaggaagtccatcatgaactagctntcccattccaatgatctt

SEQ ID NO: 17224 - DNA, 397 bp, Glycine max
agctttatctcaaatttctggctaacttatcttttattccactaacgacagagaaaggatttaaatgcttaattaatgtagttttaaaaggatgttgatctctccattgcgtaggcaagagcaagacaacgcttaccaaacaaaaaccgctcttaatttttaaaacatataataaaatgttcccttattataataatcaaattgacttcaattagcataaaaataatagcctttagtgggacaatccatagtaacctaggaaactcagtacaaatacacattaaaaatacaaaagcccaaggatataatatgcttcaaatatttgttttccacactcaaattgccatatcacgggtgaataagtgaattcaaaccaagatctaaacaaaaagctatc

SEQ ID NO: 17225 - DNA, 402 bp, Glycine max
  unsure at all n locations
agctttcttgaaacatatatgtttggtcttgttgctgacagatacaacaaactaccaattatacttctataaacagaatcatttgctaaatcaataccatcatttattgataacttttcattcacaacaattggagtgacaacaggcttgcattgctccatgcgaaacttcttcaatatctccaaagcatatttcttttgtgaaatgaagatcccatcattagactgagaaatctccatcctaagaaaatacttcatttcacccaagtcagtcatttcaaattctttttccatgtccttcttaaattggtttaaggaatcagattcatttcctataaccaacaaatcatcaacatacaaggaaacaatgagctgcatttcattnttncacttcttcacatac

SEQ ID NO: 17226 - DNA, 451 bp, Glycine max
  unsure at all n locations
tcaagctntgtgtgtggaacattgtaataccatatctgcaggagattttcttgctattttatgaacgggtaaacggtcagacagagaacgataattgacaagatttgagtcggtttctaccttctctctgcttttaggccactcaattgggcgtttatatccttcaggaacaggaacaaggcaggtaggaggttcttcaggacagtgtctttctcgatgttcatagtgtttagtactccggagactcctaatagctttccagttgtcaaggcatgggataaaatcaggaccagcagtgacattgcaaagcttccacttgtatccagttgcctgcttggaggattcttgagactccttttcattcttagactctgctgcctgagttgaccaagacccagtttctgtagtactttcttcgtgaagctcagactgagccccagaaggatatacc

SEQ ID NO: 17227 - DNA, 445 bp, Glycine max
  unsure at all n locations
catgagagagtcaaagatcaaattgagaganaaaataaatgctatgctatacaagccaacaaagggagaaagaaggttgtcttcgaacccagagattgggtttgggtgcacatgagaaaagaaaggtttcgaaacaaaggaaatcaaagcttcaaccaaggggagatggaccatttcaagtgcttgaaagaatcaatgacaatgcttacaaagttgagctgcccggtgagtataatgttagttcaaccttcaatgtctttgacttatctctttttgatgcagatggagaatccgatttgaggacgaatcattctcaagagggagagaatgatgaggacatgaccaagagcaagggcaaggatccacttggaggacctatgacaagggttagagcaaggaaagccaaggaagctcttcaacaagtgttgcccatattatttgaata

SEQ ID NO: 17228 - DNA, 401 bp, Glycine max
cgctgcaagcttctatagaaggttcgttcctaatttctctacaattgcatcacctctcaatgagctggtgaaaaagaatgtggcatttacctgtggtgaaaaacaagagcaagcctttgctttgctcaaagaaaagcttactaaggcacctgttctagctcttcctgacttttctaaaacttttgagctagaatgtgatgcctctggagtgggagttggagctgtattgtacaaggtgggcaccctattgcttattttactgaaaaacttcatagtgccacccttaactaccccacctatgataaagagctttatgccttaataagagccctccaaacttgggaacattaccttgtttccaaggaatttgtcattcatagtgatcatcaatcacttaagta

SEQ ID NO: 17229 - DNA, 425 bp, Glycine max
tatgctgcacatattaacagtagacctcctaacctcagtagcttaatcaaccacagcggagcaattatgacctttccagcaacagatacaaccctggatggaggaatcaccctaccctcagatggtccagccctcagcaacaacaacagcagcctgctccttccttccaaaatgctgctggcccaagcagaccatacattcctccaccaatccaacaacagcaacaaccccagaaacagccaacagttgaggcccctccacaaccttccctcgaagaacttgtgaggcaaatgactatgcagaacatgcagtttcagcaagagactagagcctccattcagagcttaaccaatcagatgggacaattagctactcaattgaatcaacaacagtcccagaattctgactagctggcctctcaagct

SEQ ID NO: 17230 - DNA, 433 bp, Glycine max
  unsure at all n locations
ntgaatgctctattcaatggagttgtcaagaatattttctatacttatcaacacatgcacagtggccaaggatgcatgggagatcctgaaaaccactcatgaaggaacctccaaagtgaagatgtccagattgcaactattggctacaaaattcgaaaatctgaagatgaaggaggaagagtgtattcatgacttccacatgaacattcttgaaattgccaatgcttgcactgccttgggagaaaggatgacagacgaaaagctggtgagaaagatcctcagatctttgcctaagagatttgacatgaaagtcactgcaatagaggaggcccaagacattcgcaacatgagagtagatgaactcattggttcccttcaaacctttgagctaggactctcggataggactgagaagaagagcaagaacctggcg

SEQ ID NO: 17231 - DNA, 439 bp, Glycine max
gactcacgctataatatttgaattacaacgtttagaaactgctggtaatttattaccatttatgtgtaatcgattgcgcagtgcagattctgaattcaaattttaatagctgttgtaaatcagttttggccactggtaatcgattacatcctctggtaatcgattaccagagagtaaatttgttgaaaaagactttttaacttaaatttcttggccaaactttttgctacttcaattggaattcccttcctatttaatataccctttctaagactctagagactgtcttgatcatccatcttgaatatatttaatttctttgtcttgaatagagctttgagacgcatgtgaaactttggcatcatcaaaacattcagcttgatcctttgtctacagtttcgtgatagaatactatataaagttagtggacaaaaactca

SEQ ID NO: 17232 - DNA, 451 bp, Glycine max
  unsure at all n locations
taagctctttcaactgcacaaggctcttaatatttgaagattatccttgttgaaccttcacccgacgaaaatactgacaaaaacttatcttctcctttttggacaaagtatggcaagctaggggcaagtaaattttcttcccatcagaccttggatgcaactgtgatcgtatccccatatcagctagatcttgacgggtattcaaaccatccttcgtcttgccttgaatgataaggagcgtcccaatcacactgtcacatacatttttctcgacatgcataacatcaatacaatgtctaacatctagatcagaccagtacgaaagatcaaagaaaatggtcctcttcttccatatgcaattcttacgtttatccttctttngggtctttccaaatacagtattcaggtgttgaacccactgatatacctgctcactagtcaacggtatggg

SEQ ID NO: 17233 - DNA, 386 bp, Glycine max
  unsure at all n locations
agctttttgtttgttcttgaccaaatctttagttaatcgtctttacgtaaagcagtctttgtattcgtttaaaatgcatgaagataaatcagtaggagaacaattggatttgtttaataaactgattcttgatcttgaaaatatcgatgtcactattgatgatgaggatcaagccttgttattgttgtgctctttgcttaagagttactctcatttcaaagagactntattgtttggaagagactctgtttctcttgatgaagtgcaagttgctctgaattcaaaggaattgaatganagaaaggaaaagaagtcttctataagtggtgaagggctgacagcaagagacaagaccttcaagaaagatagtanatttgataagaaga

SEQ ID NO: 17234 - DNA, 420 bp, Glycine max
  unsure at all n locations
tcaagaattatggtctcatcaaactatttgtttccttatggaaattctataaacagacctcccatctttaatggagtgggttaccactagtggaaaacccgcatgcaaatcttcatagaggcaatagatttaaatatttgggaagccatagaacaaggaccttatgttccctctataatagccggaagtgcaaccatagaaaaacctagagcagattggactgaggaagaaagaagattagtacaatataatttaaaggccaaaaatattattacatttgccttaggaatagatgaatactttagggttttaaattgtaaaagtgctaaggatatgtgggatacactacaagtaacacatgaaggcacaacagatgttaaaagatctangataaacactntaactcatgaatatgaactt

SEQ ID NO: 17235 - DNA, 421 bp, Glycine max
taaattacttctgtcagaaaagccttacaaattggaggaggatgacatgggaaatttagaagagaatcaggaatctagaataggactatataactggaattatcttgtagacaatattcaagctagtgacaaggaattattgtcgggactgcaggctctttcagcgctggagattaatgggtattggagactagtagacgagagttacatggacatgattctgggaatgcttttgaaaaatgcagtgttgaatgactggtcacttaatgctttaaatgaagatgaagttgtgagtatactggaatcagatggatttcctagggtgcttgcaaggcattgtttgcacgtatatggcaacaaagtaaatgagtgcatgcctagctttgtttggaagttggatgagaagcgagtatgcatacat

SEQ ID NO: 17236 - DNA, 397 bp, Glycine max
agcttatacattcaatttcgagcgtctcgatatattacgggactcaattagacatccgagtaaaaatttattgtcgtttgaattggctcacaggctcaacattcaatttcgagcgtctcgatatattacgggactcaatcagacatccgagtaaaaagttaatgtcgtttgaatttgctcatagcttaaacattcaatttcgagcgtctcgatatattacgggactcaatcagacatccgagtaaaaagttattgtcgtttgaattggctcataggttgaacattcaatttcgagcgtctcgatatactacgggactcaatcagacatccgagtaaaaagttattgtcgtttgaattgctcatagcttaacattcaatttcgagcgtctcgatatat

SEQ ID NO: 17237 - DNA, 425 bp, Glycine max
  unsure at all n locations
ttgagcaaattcaaacgacaataaccttttactcggatgtctgattgagtcccgtaatatatcgagacgctcaaaattgaatgttgaacctctgatccaattcaaacgacaataactttttactcggatgtctgattgagtcccgtaatatatcgagacggtcgaaattgaatgttcaacctatgagccaattcaaacgacaataacatttaactcgaatgtctgattgagttccataatatatcgagacgctcgaaattgaatgttcaacctctgagccaattcaaacgacaataacttattactcggatgtccgattcaataccgtaatatatcgagacgctcaaaattgaatgttgaacctctgagcaaattcaaacgacaataactntttactcggatgtcttgattgagtccgtaatata

SEQ ID NO: 17238 - DNA, 439 bp, Glycine max
tgctaaagttgagaagaccaagaatttgattcaacccaattatatgcgatagggctcaaaaatgcatcaggaataccaaaggaactgaccaaggcaagtgcgtgtggtcgaagttcagcacagagttttggcacttctttcctcactgcagaagcattctctgttgacaagtatccatatcgaagaaaggcagaatcttcatccacacatatcacagcatacaacgatctcaatagacccaagacattctacagaggagataaataaaagcaaagaaatcaataaatggatctgcttcacattttgaccctacaaggagagtgctaacaacactctttaacatgagaaattattaagtagtctgaaactattatagtccccactaactaatatatttacataaaacaaaattgagtgttattaattcttttcttgtaaa

SEQ ID NO: 17239 - DNA, 436 bp, Glycine max
  unsure at all n locations
ggcaattcagctcgtacccgggatccttaagtcacctgcgtttgcaactttgtggcttantgaagatgaagaggtaaaagtgactcaacaggttgaggtgtgtctcaccattgggagatataatgacaaggtgctgtgtgatgtggtcccaatggaagcgacccatgtgctgttaggaagatcgtggcagtatgataccaaggcagtgcatgatggcttcaccaacaacatctctttcaagcaagctgacaagaagattgttctcaaaccgttatctcctcaagaggtttgtgaggatcagataaaaatgagagaaaagaaaaagagtgagacacttgagaggaaaaagagtgagacacttgagaaggaaaagtgaggaaagactaagagtgatacacttgagagggaaaagagagatnatcaaaagagtgaaaca

SEQ ID NO: 17240 - DNA, 419 bp, Glycine max
tctttgagaaaacttccttgagaagctagagcttagctacattcacccctctcataactaagctcacctccttgagaagcttccttaagaagattcctaaagaagctagagcttagctacacatacctttctaatagctaagctcacctccttgagatgagaagctagaacttagctacacacccctataatagctaagctcacccccatgacaaaatacatgaaaatacaaaaaaaaaatccctactacaaagactactcaaaatgcctcgaaatacaaggctaaaaccctatactactagaatggccaaaatacaaggcccaaaggaaggaaaaatctattctaatatttacaaagataagcgggctcatacttagcccatgggctcgaaatctaccctaaggctcatgagaaccct

SEQ ID NO: 17241 - DNA, 385 bp, Glycine max
agcttggaactaagcttcttttctctaaaacttgtcatccataaactgatggacaaacagaggtagtgaataggtctctatccacccttttaagggctcttttgaaaggcaaccataagtcttgggatgagtatcttcctcatgtagaatttgcctacaataggggggttcatagaaccactaagcaatccccttttgaggttgtctatgggttcaatcctctaacacccttagacctaattcccctcccacttaacacttcttttatacataaagaaggggaatctatgtcaaagtttgtaaagaagtagcatgagagggttaggaaccaaataaagaaccagacaaaggtgtatgcaactaaaggcaatagaggaagaaatga

SEQ ID NO: 17242 - DNA, 377 bp, Glycine max
  unsure at all n locations
agcttgtaatcgattacacatatactgtaatcgattacctgagcagattttcagaaaatattctcaacagtcacatctttttatgtggttcttgaatggctatcaaaggcctatatatatgtgacttgagacacgaatttgcgaagagtttttcaaaacaaaaaagtcttatcctcttataaagcaaaattgttttatcctcttacaaattccttggccaaattacttgtgattcaataaggaatttttgagtgctcaaattgttcaatctatctctttcaagagagatttcttcttttcttcttcttcattctgaanagggattaagagaccgagggtctcttggtgtgaaagaattctaaacacaaagtgatgtg

SEQ ID NO: 17243 - DNA, 414 bp, Glycine max
gcttatccaaggctcatcttggcggttaagttccttcttccaaggcttattccctagtggatggcgcctcctctctcctcttctcctttgtcttccgcttcatctccatggtgaaaaatcaccatcaaaggacctcattgaagctcaaagatccagcctccatagaagccccacaagcaagcttccatcacaaattccgcaccagcatgattggagtaccgaccttaagtgttaatttgtgattaggtatccctgatgttttcaatgagtttagaaatttaggtgtcagtaatccgaaagtaggattgagtagttcatcttatttatcaatgttatcagtgctacaatactccttttcgtcattgtgtatcaatgataagacaataatctattttgtcaacaatatctttttta

SEQ ID NO: 17244 - DNA, 431 bp, Glycine max
  unsure at all n locations
taatacccaaaatcacatctataggaccaaggtcttttatatcaaaattactagacaagaaagacttcatatcatttatgaaatgcatattactaccaaatatcaatatgtcatccacatacaaacataaaatgatgcatccactatcatcaaattgtttcacatacacacatttatcactattattgatttgaaaacaatatgaaagaacaacttgatcaaacttttcgtgccattgctttggaggttgtttcaaaccatataaagatttaacaagtttgcaaaatttcttttctttacccggttctacaaaaccttcaggttggctcatataaatttcttcttttaaatcaccatttaaaaaaagctgtttttacatccatttgatgaattntcaaattaaaaacacaaacaagtttaattaaaactct

SEQ ID NO: 17245 - DNA, 430 bp, Glycine max
tcttattttcagcagatgaagatgaatccgtggccacatcattgacttctctaaggacaataacatcatttcttgcactgaattgttgggagttggaagccatcttctcaattagattcctagcctcagcaggagtcatatcaccaagagctccaccactggcagcatcaatcatactcctctccatgttgctaagtccctcatagaaatattgcagaaggagttgctcagaaatctggtggtgaggacagcttgcacacaatttcttgaatctttcccagtactcatacaagctctttccactaagttgcctgatgcctgaaatgtcttttctgatggcagtggtcctagatgcagggaagaatttctccaagaacacccttttaaggtcatcccaactggtaatggatctgggagcaaggtagtacaa

SEQ ID NO: 17246 - DNA, 374 bp, Glycine max
ttgcatgcaagctttgatgcaacatatggagaggttaatgaaacaacgagatgatgcgctccatgagaggctggatcaaatggagaatagagatcatactgaagaacaaaggacgagaagagggaatgatggtgttcctagacaaaaccgaattgatggtattaaactcaacattcctccatttaaaggaaagaatgatccggaggcctacttggagtgggagatgaaaatagagcatgttttctcatgccacagctatgacgaggaccagaacgtgaagcttgccgccacggagttttccgactatgctcttgtgtggcggaacaagctacaaatagagagagcaagaatgaagagccttggttgatcatgga

SEQ ID NO: 17247 - DNA, 371 bp, Glycine max
agctatagccaattcaaacgacaataactttttactcggatgtctgattgagactcgtaatataacgagatgctcgaagttaaatgtttaagctctgagccaattcaaacgacaataactttttactcggatgtctgattgagtcctgtcatatatcgagacactcgaaattgaatgttgaagctctgagccaattcaaacgacaataactttttactcggatgtgtgattgagtcccgtcatatatcgagacgctcaaaattgaatgttgaagctctgagccaattcaaacgacaataactttttactcggatgtctgattgagtcttgtaatatatcgagacgctcgaaattgaatgttgaacctctga

SEQ ID NO: 17248 - DNA, 425 bp, Glycine max
taaacattcaacttcgagcgtctcgatatatttcgattctcaatcaaacatccgagaaaaaagttattgtcgtttgaatttgctcagaggttcaacattcaattttgagcgtctcgatatatgacgggactcaatcagacatccgagtagaaagttattgtcgtttgaattagctcagagcttcaacattcaatttcgagcgtctcgatatgtgacgggactgaatcagacatccgagtacaaagttattgtcgtttgaatttgctcagaggttcaacattcaatttcgagcgtctcgttatatcacgggactcaatcagacatccgagtataaagttattgtcgtttgaattgtctcagaccttcaacattcaattttgagcgtctcgatatatgacgggactcaatcttacatccgagtaaaa

SEQ ID NO: 17249 - DNA, 427 bp, Glycine max
  unsure at all n locations
tctaaactttgtacaagaatgaagctctgatacctcttgttagacaagtggcctcagatatcttaagaagggggggttgaattaagatattccaaactgtttcccctaattaaaaatctatttttctttttacttaagttatgaattcccttaatgacaatcttcttaaatattaattcaaatgaagcaacttgaatatgaatataaagcaataataaataaaggagattaagggaagagaaaatgcaaactcagttttatactggttcggccacacccttgtgcctacgtccagtccccaagcaacccgcttgagagttacactaactngtaaattccttttacaagttctaaacacacaaggacaacccttcctttgtgtttagagatcttttacaacaagagactcacagtctcttaatccctt

SEQ ID NO: 17250 - DNA, 394 bp, Glycine max
tcgaggaatcccatgtattttaaccaccatgtcgactatcaaggatgccaccatatgagcagtgtgagacgttggtaacattcccagatgaatccccttcgaaaaacggtccaccaccacgagaattgtggtttttcgtgatacgccggcaggccgacaatgaaatctaacgagaggtcctcccaaggtcgatggggcaccggtaaggggcataatagtcctgcgacgcgttgtgtctggtacttagtgacctgacaatccatgcaatttgccacaaattgcttgacatcttctctgagaccggtccaagtgaagttctctgaaattcgagctaatgtctttgtgattccggcgtgaccccctgttggagtcgtgtggtattcctgaagtaatg

SEQ ID NO: 17251 - DNA, 361 bp, Glycine max
agctttggagaaatttaaatggtcattacttttcactcggacatccgattcaggcgtataatatatcgagacgctcaaaattgaacagtggaagctattgagcaattcaaatggtcataactgttcactcggatgtccgattcaggcacataatatatcgagacgcccgaaattgaacaacggaagcttttgagaaattcaaatggtcatttctttacactcggaggtccgatcaggcgcatcacatatagagacgctcgaaattgaacaacggaagctcttgagaaattcaaatgggcattacttttcacttggaggtgcgaattatgcgtataatatatcgagacgctcgaaattgata

SEQ ID NO: 17252 - DNA, 431 bp, Glycine max
tcaacctagaggagacggaccattccaagtgttggagaagatcaacgacaatgcctacaagattgacttgcctagtgagtataatgtaagtgccactttcaatgtgtctggtctatctctttttgatgcagatggaggagccttggatttgaggacaaatccttttcaagaaggagggagtgatgaggacatttgataaaatttggtgagagtttctctctgggttccttgttgaaccaattatcagacttatcaaggtaatccttgtggcgtctacccagacttatcttccttcattggaagtggcgtctacccggacttatcttccttcaccggaagtggcgtctacccagacttatcttccttcactggaagtggcgtctaccctgacttatcttccttcactggaagtggcgtcatccaaatcttcg

SEQ ID NO: 17253 - DNA, 430 bp, Glycine max
  unsure at all n locations
ntaacaagcaatagatacataatcaagtcatagcagttgtgtatgatatgacatttaatataaaactgattttgtgtatatgccattatgaataataactttctgaagacaatcaaacaaaaagcaactctgaatgtaaactagagaaactagagagtttaggcattaccatggaaggaagcgcatcatgatgtcaccatccccagttgcacaacatgcaccaacttcatcaatggcatatgctgaggatccagcaatgggaccatctcctactctgtaatcaatgaaaaagattcaaagaaaacctaattataaaatgcatcaatagaacatacaaaggatgattgatagatgctgcattaacaatgtgtggtgtatatctgagcatatgtacttgggaattgataaggcaatttgtgaacggctaaat

SEQ ID NO: 17254 - DNA, 403 bp, Glycine max
  unsure at all n locations
ntgagcaaattgaaacgacaataactttatacacggatgtcttgttgatttccgtaatatatcgagatgctcaaaattgagactagaagctctgagcaaatttaaatgacaataactttatacacagatatccggttgagtcccgtaagatatcgagacgctcaaaatttagatccgaagctctgagaaaattgaattgacaataactttatacacggatgtccggatgagtcctgtaatatatcgagacgctgcaaattgaaaacggaagctcgtaggaaattcaaacgacaataactctttactcggatgtgcgattgaatcgggtaatatatcgagacgatctaaattgagactagaagctctgagcacatggagatgacaataactttatacacggatg

SEQ ID NO: 17255 - DNA, 422 bp, Glycine max
taaaatttgatatctaacaagcttcatacttaaaactttttttatctattaaaccaacatttaatcatttccttagaattacaagtaaaaaccctaatagaaaaactctgtaacacactatattccaccaggactcaattatcgaataataattaaataatatctgcaaaataagtttaaaattataaaaataattattaacaaaaagcatctaaagttaatacaaataaaataattataattgaccaatgccagtgttctttgttttcttgtttagcaagaaaaaatgataggatgggttatttttcaggaagcatagtccaacttacgttaagccagtccctgatatatcaaattccaaatgtatgcaagaacggtcagactcgggtttgtgaagctccctttgtacagcaacattcacc

SEQ ID NO: 17256 - DNA, 384 bp, Glycine max
agcttttcttggtgggttgatgtactctatcacataggatagcatgatcactaacagacatattttcaatcaattcagtttcctcttcaggggttttcagctttatcttccctcctgctgaagcatctaacaactgcttggtttgcggtctcagcccatctataaacatgttcaattgaattggctcaaagaatccatgagtgggagtctttcttaacaaaccccgaaatctctccaatgcttcactcaatgactcatcagggaactggtggaatgatgaaataacaacattcccttctgcagtctttgactcgaggaagtatttcttcataaatttctcaacaacttcctcccatgtcttaagactgttgcctttgaatgaat

SEQ ID NO: 17257 - DNA, 389 bp, Glycine max
agcttcaagagaaagatgtcctcagcaaattccttatttccagaagggaattctatcaatagacctccaatctttaatggagagggttaccactactggaaaacccgaatgcaaattttcatcgaggcaatagatctaaatatctgggaagccatagaaatagggccttatatacccaccacagtagaaagagtttcaatagatggtagttcatcaagtgaaagcataaccatagaaaaacctagagatagatggtctgaagaggatagaaaacgagtacaatacaacttataagccaaaaacataataacatctgccctaagaatggatgagtatttcagggcttcaaattgtaagagtgctaaggaaatgtgggacactcttcgatt

SEQ ID NO: 17258 - DNA, 378 bp, Glycine max
  unsure at all n locations
agcttgtctctggaaactctgctggcaccgacactgcctattatgtaagttcttcctttaactttattactattatattattgtagaataataaaaatactaataacccattaatggggtttactttcttttatccctttattataaacactgtcattcaaagttaataatagaaaacatgccttttgtttgcatttgcatttgcagttatcttcaaaaggatcaacttgggatgaaatagactatgaatttcttggaaatctgagtggtgatccatacatccttcacacaaacgttttcagccaaggcaaggaggacagggaacaacaattctatctatggttngacccaactgctgatttccacacttactccatc

SEQ ID NO: 17259 - DNA, 368 bp, Glycine max
agcttgcttctacaattactagtatgggactcatgcgtatgcacgagtcgctccgctatatttttttgttttggtattaaaattgtgcctacacacgggtaagccgtgagaattgacaatataattatatttgtgtcattataacactagacaatattatgatgtataactaattgagaacaaaaatgaatatggttaaaaaaattatgattaacacatagtaaaataactattatataagaaactgttaattaacaaagtcataatgttcaagagattgtttttagcaaaaacatgcccacaaaataaagtgttaatttacaaatattaacaaaagtcagaataatattaaacttaattcattaaca

SEQ ID NO: 17260 - DNA, 416 bp, Glycine max
  unsure at all n locations
gcatccaataccctgatgaggatgtcccatatgttcttaagactggactgattcatttgcttgcaaagtttcatggccttgcaggtgaagacccgcacaaacatttgaaagaatttcacattgtctgctctaccatgaaacccccagatgtccaagaggatcacatatttctgaaggcttttcctcattcattacagggagtggcaaaggactggctgtattaccttgctccaaggtccatcacgagctgggatgaccttaagagagtattcttagaaaaaattttccctgcttccaggaccacagccatcaggaaggatatctcaggtattagacaactcagtggagagagcctgtatgagtactgngagagatataagaaactatgtgccagttgcccncaccatcagatttca

SEQ ID NO: 17261 - DNA, 429 bp, Glycine max
cccttatgctgcaaatatttacaatagacctcctcaacctttcagctaaatcaaccacagcagaacaattatgacctttccagcaacagatacaaccctggatggaggaatcaccctaacctcagatggtctagccctcagcaacaacagcagcctgctccttccttccaaaatgctgctggcccaagcagaccatacattcctccaccaatccaacaacagcaacaaccccagaaacagccaacagttgaggcccctccacaaccttccctcgaagaacttgtgaggcaaatgactatgcagaacatgcagtttcagcaagagaccagagcctccattcagagcttaaccaatcagatgggacaattggctacccaattgaatcaacaacagtcccagaattctgacaagctgccttctcaagctgtc

SEQ ID NO: 17262 - DNA, 402 bp, Glycine max
  unsure at all n locations
ntgaatgctctattcaatggagttgacagtttatcttcagactgatcaacacttgcacagtggccaaggctgcatgggagatcctgaaaaccactcatgaaggaacctctaaagtgaagatgtccagattgcaactattggccacaaaattcgaaaatctgaagatgaaggaggaagagtgtattcatgacttccacatgaacattcttgaaattgccaatgcttgcactgccttgggagaaagaatgacagatgaaaagctggtgagaaagatcctcagatccttgcctaagagatttgacatgaaagtcactgcaatagaggaggcccaagacatttgcaacatgagagtggatgaactcattggttcccttcacacctttgagctaggactctcggata

SEQ ID NO: 17263 - DNA, 410 bp, Glycine max
tagcttcgaaccaaaaaaacaacacatttctattttgtgagtgtatgaattacatactgaaaattttacaaggataaattccgaacattttgatatttataagaacaaaaaatatattttagccttgtttttattgttaaaaaaaaaaaagagagaaatgctactaacattttctttaacacactccttcatacacactttctcttatgtgttaaaatgtatttagttgaagaacaagttccacaaaatcttgaacctaccaagtgtgatggttgggattggtatgagcgcgaacatttgccttacacatttgacgtgactgtcactgcaatggaagatgcccaacacattcgcaatatgaaagtggatgaactcattgggtcccttcatacctttgagctacgactctc

SEQ ID NO: 17264 - DNA, 422 bp, Glycine max
tttggttcatatttcgacgaccaatccttcctattgtacttctttgttgaagaaattttttctgtgattctttacataaagattcataaaatactggatctccaccaacacaagcaaatggtcgataaaactccaaaatggcattttctttcgaccctattatttttttatccttatcatttaggaaagaaacgaaaatatcaggataacaaacattctctagaatttcgcttaaattcgaacccatagctgatgataaaactagaatagatattttctgtttcctactcacacgagcccatatccttgcttttctatcaatctctaattctaatctacccccccagtctgatattatggtgccagtatagaccgaaattccgctaaggtccaattctgaacggtaataaataccaaggctt

SEQ ID NO: 17265 - DNA, 377 bp, Glycine max
  unsure at all n locations
agcttgccgccacggagttttccgactatgctcttgtgtggtggaacaagctacaaaaggagagagcaagatatgaagagccaatggttgatacatggacggagatgaaaaagatcatgaggaagcggtatgtgccggctagttactcaagggacttgaaattcaagctccaaaaactaacccaaggcaacaagggggttgaggagtatttcaaggaaatggatgtgctcatgattcaagcaaatattgaagaagatgaggaggtaactatggctcgatttcttaatggtttgactaatgatatccgtgatattgttgagctgcangacgttgttgaaatggatgatttgcttcacaaagcaatccaagtggagcaa

SEQ ID NO: 17266 - DNA, 388 bp, Glycine max
agcttaatgtcatagttttcatggtgctagtgataacaataatgataatattagtaatgatgatagtatagtgacaataatgataagatgatcatgatataatagtgataatggtgacaaaaatagcaatagtaatagagatgatgataataatgataatagtaataatgatgacaataacgatgataatcgcgaaagtattaagtatacctttattttattttaggtttcattacttatttgatgtcactatttattattgcattcaatttggtctttacttatttaaaaaacaagtaattcattaggtcttttttgttcaaaactatttatttatttatactggtttaagttaaatcaacattattttttttataattaatgcttg

SEQ ID NO: 17267 - DNA, 421 bp, Glycine max
tcaagaattaatggcctcatcaaactacttgttcccttaggcaattcaattaataggcctcctatttttaatggagtgggttaccactattggaaaacccgcacgcaaatcttcatagaggctatagatttaaacatttgggaagccatagaaatagggctttatattcccaccatggttgctggaaatacaacaatagaaaagcctagggaagattggagtgaggaagaaagaagactagtacaatataacttaaaagccaaaaacataattacatctgccctaggaatggatgaatactttagggtatcaaactgtaaaagtgcaaaggatatgtgggataccctcaagtaacacatgaaggcacaacaaatgttaaaagatctaggataaacacacattaactcatgaatatgaacta

SEQ ID NO: 17268 - DNA, 357 bp, Glycine max
agctttgagcaaattcaaacgacaataaatttttactcagatgtccgattgtgtcctgtagtttatcgagacgctcgtgattgaaaatggaagttcgtcgcaaattcaaaagacaataaatatttacttggatgtccgcctgagtcccataatatatcgaggcactcgcaattgaaaacggaagctcgttggaaattcaaaagacaatatatttttactcggatgtgctattgagtcccattatatatcgcgacgctcataattgattacggaagctcgctggagattcaaccataataactttttactcggatgctcgattcattccttaagtatatcgagacgctcggaaatcac

SEQ ID NO: 17269 - DNA, 392 bp, Glycine max
  unsure at all n locations
ttgagcaaattcaaacgaaaataaattntaactcggtatgtccgattgtgtgttgtactatatcgagacgctcgtaattgaaaacggaagctcgtcgcaaattcaaacaacaataaatttttacacggatgtcggattgagtcccataatatatcgagatgctcgtaattgaaaacggaagctcattataaattcgaaccgtaataactttttactcggatgttcgattgtgtcccgaagtatatcgagacgctcaaaattctgaatagaggctcttagtaaattcaaatgacactaactntttactcggatgtccgaatgaatcccgtaatatatcgagatgctcgaaattgaaaacacaagctcgtagcaaatgcaaaccacaataacct

SEQ ID NO: 17270 - DNA, 419 bp, Glycine max
  unsure at all n locations
tcaacatcagaccacttccagggtgctggatctacttcacatggatttgatggggcctatgcaagttgaaagccttggaggaaagaggtatgcctatgttgttgtggatgatttctccagatttacctgngtcaactttatcagagagaaatcagaaacctttgaagtattcaaggagttgagtctaagacttcaaagagaaaaagactgtgtaatcaagagaatcaggagtgaccatggcagagaatttgaaaacagcaggttcactgaattctgcacatctgaaggcatcactcatgagttctctgcagccattacaccacaacagaatggcatagttgagaggaaaaacaggaccttgcaagaagctgctagggtcatgctccatgccaaagaacttccctataatctctgggctg

SEQ ID NO: 17271 - DNA, 404 bp, Glycine max
agcttgcattttatatgtttcgaacaaatctgataggtgaaataaatatttttttttaagttcgtatcttgctcaccaaatctactaaaaaacacactcgtccccgtacctaaataatgatgtgaaaaaatattttttgaagaataaaaaatgtataaaattagaagattttttctttcatattttaagctaaaatatatcacactaaaatatatcaacttttataatagtattaaacaataaatattaaagtgttaatactaaaatatactaacatttataatagtctcaatattaaaagcatcaaaatgtcttacatactggtttatatcggtaatccgcaagtcggtagataaagtccactaggctaaactaaaaaatttaatatagttatccagattttt

SEQ ID NO: 17272 - DNA, 407 bp, Glycine max
agcttttctactaagttgcctgatgcctgaaatgtcttttctgatggcagtggtcctagatgcagggaagattttctccaagaacaccctcttaaggtcatcccagctgaaaacggacctgtgagcaaggtagtatagccaatcttttgtcactccctccagagaatgaggaaaagcctttagaaagatatgatcttcttggacatcagggggcttcatggtggaacaaaaaatatggaactccttaagatgcttatgaggatcttcacctgcaagaccatgaaactttggcagcaaatgtattagtccagtcttgagaacatatgaaacaccctcatcaggatattgaatgcacaagctttcataagtgaaatcaggtgtagccatctccctaagagtcctcttac

SEQ ID NO: 17273 - DNA, 337 bp, Glycine max
  unsure at all n locations
cgtggctatacgagacatctttccaaacaaagtcaggttagcgataactcgcctgtgctttttcttccatgctatatgtagcaaagtcattgatccagtcaagtttgatgagttggaaaatgaggccgcaattatactgtgccagttggagatgtattttcaccctgctttctttgacatcatgattcacttgattgtgcatctggtcagagaaatcaaatgttgtggtcctgtntatctacggtggatgtacccggttgagcgatacatgaagatcttaanagggtatacaaagaatctatatagtctggaagcatctattgttgagaggtacatt

SEQ ID NO: 17274 - DNA, 287 bp, Glycine max
aattctagtcaacaaagcaaaaattcttgtgtttaacacttttattttacctaattgacattattattgtatacagctagacttgtgatggttttaagcttgcttttctttttgattaatgacagattactgcactggtcacaacaaacctgaacaaagtaattgatgttaattactacccagttgaaaatgcaaaacggtctaacttgcggcacagaccaattggtattggagtacagggtcttgctgatactttcatacctccttgcatggcatttgattcacca

SEQ ID NO: 17275 - DNA, 410 bp, Glycine max
agcattgattgaggattgtattgttcatccggtgtctgaaaatcccacccaaggttatcaaattcgagagtttacaaaaactcgtaagagtttcatagactcgactcgtaaactcaactcatagactcgtaagagtctacttcatataaaaataataacaaaatatctataaataacatactaattaaacatttcaaccatataataaagcaaaatagtaaatcataaagttcagaatatttaaataatcaagtctagtaataatacatgactactaaacaataacttgtaaaggttatagtagtggtagatcattctcattgagggtttgatgttattagagaacaagagtttgatattattagaggtaagaattttatatttgagaataacacgctacatgaaggtat

SEQ ID NO: 17276 - DNA, 398 bp, Glycine max
tctaaacggatctcatctagctcattttgttgcaactttctttcctctccagcctgatcaatagagaagttgcaggtctttacagcccagtaggctttgtgctctatctctacaggaagatgacatgccttgccaaagacaacccgataaggagacattcctatgggtgctttgtaggcagtcctatgcgcccaaagagcatcatctagcctggtgctccaatcctttctgttcggctgcacaatcttctcctagatcctttttatctccctgcttgaaatctcagtctgcccattggtttgggggtggtatggtgtgtgtcgcaacctaccctttggcgggcgagcgaggtgagggctcacgggtgcgtcttccataggaggaaaatgcgcggagtc

SEQ ID NO: 17277 - DNA, 388 bp, Glycine max
tggcttgcaagctttgaccatttgaatggctcaagcgcttccattgttcaatatcgagcgtctcgatctattatgcgcttgaatcggacctccgagtgaaaagttaagaccatttgaattgctcaagagcttccattaaccaatttcgagggtctcgatattttatgttcctaaatcagacctccgagttaaaagttatgtccatttgaatatctcgagagcttccgttgcttaatttcgagcgtctctatatgtgatgctcctgaatcggacctccgagtgaaaagatatgaccatttgaatatctcgagagcatccgcttttcaatttcgagcgttcctatatgtgatgcgcttggatccgacctccgagttagaagtaatgacca

SEQ ID NO: 17278 - DNA, 412 bp, Glycine max
agcttcttattttcagataatgcagttgagtttgtagctacctcatgcactcctctaatgactatagcatcatttctggcgctaaactgctgggagttggaagccatcttctcaattaaatttctggcttcagcaggagtcatgtctccaagggctccaccactggcagcatctatcatacttctctccatatttcggagtccttcataaaaatattggagaagcagctgctctgaaatctgatggtgagggcaactggcacatagttttttaaatctctcccagtattcatacaggctctctccactgagttgtctaatacctgagatatccttcctgatggttgtggtcctagaagcagggaaaaaattttctaagaatactctcttaaggtcatcccagctcgtgatgg

SEQ ID NO: 17279 - DNA, 323 bp, Glycine max
ttgcttttttcaactttctatcacctggcttcacccatgttggaaacccttctttgtaacttggttcttggtatggaaccttgttaagggccaaggtgtagctcagcaacttagtaacattgttggacatcaaagggagaacgtagtcttgaacaccaagctcatacaacccggctttgcatgtctcaaggttagtgagagctgcgctgagccatgtttgggcatcaacttgtgagagcttggtgttatgctttatggtttggctgagattgcgaatagtttgctcataaagctcaacacaatcagcccatgcaactctttac

SEQ ID NO: 17280 - DNA, 396 bp, Glycine max
  unsure at all n locations
tcacttggttcaggcctaatgtgtttcgtcaagagcagacttgacagattcctagtgtcagatcaatggctagtcatatggcctgacacatcccaacatgttcttcacagagattactctgaccattgcccggtaattttgaaaactaaactggttgattggggtcctaagccctttagggtgctggacttatggctcaatcaaaaaggatatcaaaagctggtgcaagagtcttggtctaaggaccagcagggtggatggnggggcattgtccttaaaaacaagctgagaaatcttaaaaataccatcaaacaatggagtaaagctaatgctgatatcaatgctaatagaatccagaagttgagacagaagcttaatgacttggaaactacagct

SEQ ID NO: 17281 - DNA, 343 bp, Glycine max
tagggattacggatactttactaagtatgatctactattatttgacaacttaatgtttagggtttaggggtatttgacaaatgacgatttttatgtagtttagcacttagggtttagttttacctgactaattcgggttaaaggttatttgacctattaaggtcacttgcctaattacggattaggtatattcgaaaaattaaggttacttgactaattatgatttatatgtgtctaactgattaaggatatgaatacatgactgagtagggtttatatgtacttgaccaactatgggtgagggttatattacctatttgtttacagatacatgactaattat

SEQ ID NO: 17282 - DNA, 427 bp, Glycine max
  unsure at all n locations
actcagcttaaccccttcttctcctatctcaaaatttgtgaggctattcttcaaagcaattatgataataatgtcccattcccacttgctgctcatatggttgtcctgtgttattttgcaaattaaagtattattatatttttaaaaagaataaaatgtcgagaaattagatcatattatgtatgttacaaagttacgtaagtgaatattatatgatcaatgatattggtttcaccttccatggaactcagaaactgttgtgctgaaattgaagatttgtgcaactctttaccaatcagtttctcccacatttgcacaacctctctctgggataatatgttttcaggtggccttatgtaaactgtcttgttccgtgttctngggtcatctatggttttgatagtggacatagctatatcatcttcat

SEQ ID NO: 17283 - DNA, 348 bp, Glycine max
tattgtggagttctaaacggattatacaacaacaacttggctccagatgtgggccgagtaagcatatgcaaagtggccaggaaactcttcaacttagaacaaatcgctttgcactgttgatcctaatgaaattcggttggctgtttcagcagttggaaaaatgatttcgccttcttggccattctcagtagaaatcaagatagagccaccagtctatcgatcaacttctatacttccttcatgttttgtgggctgcacatggcagttcctacttcgtacttgtttgggttggcctcgatccccctgcaggtgattcatgaaccaaggaacttaccccctccaaccctg

SEQ ID NO: 17284 - DNA, 401 bp, Glycine max
agcttctcatttgatccagcagaggagaagcatacaacctatttcactcaagtcacacccacggaactctagcacaagagacttggtcatcgtcatcttgaaagaatgctaaacatgaaaaaaatgaaatatgcaaaagaaaatttgaagaagtttcaaacggaggaatgcaaatctgttagtacacaaatgaatcaaaaggagaagttcagcaaggaagaaggcgttgataacattgatgaaggatattatgggaacttgattggatgtctaatgtatctcactacaacgagaccaaacattctattttctcaaaagaacaaaactggaatttttgtgacaatcaagtagtcattgctattgcaaacaatcccgtgtgtcatggaaagactaaacatttc

SEQ ID NO: 17285 - DNA, 383 bp, Glycine max
  unsure at all n locations
tcaccctcgttgtaaggcaacgacaaagggatctcatatagtttcaggcaagcttgccaagcggttctatggacccttccaagtcatagaatgcattgggctcgttgcatataagttacaattgccagaggaagttaaaatacaccccgtattccactgttccaagatgaagtcttttcgcggttcaccgaanaatatggcgggaattacctggcacaaggagttactcaacgaccaacccctcgtgtttccattagctatcttggattaccgtagagcatccaccgaggatccctgngaggtgttcatgcaatggaatggtatctcacctgatgatacctcgtgggaagactggaatcagctgtgtgaaaactaccaccttg

SEQ ID NO: 17286 - DNA, 423 bp, Glycine max
tcttccggtttcatcctctatgcaactcgcagatatcttcaccaatgttttatctccttctatttttcaacacctttgtaccaagctgggaatgatgaatatccattcccagcttgagggggggatcttaacagcatcttgttagagttagttatgatagttatttctgttgtaaccactctcgtgcttgtacatatataagccctcacgtgcatttaataagatgagttgcagttttgatcatcaagagccaagcgtagcttttcactgcaccacctgatatttttcttctcagaaacatgagtttcacgtttttcttccagcttagttcaatatttgttttcaacagtaagttagcatcaacaaatatataaaatgcttggcagagtgtacattactatactacctacgtgcttatctatt

SEQ ID NO: 17287 - DNA, 375 bp, Glycine max
  unsure at all n locations
gtggatcccgatagtattattgctgcagctctaatggatatgtatcaaagtatgggagatgctcttgcccagcaatacggtggctctgctgctcacaatactgtatgacattttgggggaatctaaatntatgtaatctgccgacaaatatctaactgcttatttgcatcttcttctgcagctgttgtgatatatgtaacatatattttggtgaatgacaggtgtttccagagaggcatggaaagtggaaagcaacaacacaatccagagagtttttaaaatccataaaacgatactatagcaatgcttacacagatggtgaanaacaagatgcaatanacttgtattattccttccacctcatttatctcaata

SEQ ID NO: 17288 - DNA, 394 bp, Glycine max
  unsure at all n locations
agctttatattgaatcttctaaaccttttcccttgataaaaacatcagggactaaattatgccaattcctctttcaaggacacattgtcatccctctgatctatatgctccaatgctcctctatccacaaaatttaccattctgtgaggcacaaaagccttaagtaaaatgagttgcttcttaattaaaactcctattcttctcgtagtgcttcttctggggaaagtactccagacttatctatacatgtggcatgacaagtaccaatgatcaatgagagtaagttattccaagattttttcaccagttgaaaaaagattaaataccacagttccaaccaaatacaacccaactgaaaccttgaaaacatcatcccaggagcctgaanatagtc

SEQ ID NO: 17289 - DNA, 398 bp, Glycine max
ctccgctataccttctagtgatcttgagcgcttttgcattttctctagaagctatcggacttgttactttccctgtatatgatgagagattgcttaagaactgttctatttgctgtgatgacaagccagtgccaattatgattaccttaaaatgttctcacacattcttgtcacattgcttgagggcctatgctgatggtaaagtacaatcttgtcaagtccctataagatgccctcaaccaggatgcaagtattgcacatctgtaactgagtgcaagtcttttcttccattcacctcctttgaatctctggagaaatccctgtctgaagcgaatatatgctgtccacatagaatttatctgccatatccaaatcgctctggtctccttgatcctcat

SEQ ID NO: 17290 - DNA, 412 bp, Glycine max
  unsure at all n locations
agctttataattntcatatgataataagcttcacatagaaggtaataagaggtataatatttcacaatgcaaagaatctaagaataaaacttgttaagttctttaataaagaatctcacacaaaaatatatatactaaaagaaatcatcattgaaaagaaaaatccaaaataataacttgctaatattaatttatttaagtccttccccttcctttttggtcatcatcattaactctagttcatcaagaataaattaacaattttaagaattttattctcatcaagtgatccaaattcatctcctacaatgtcctacattttagtttcctcttgatggtattgtaggaaatttcttgaaaggagacgaagattgttataaacaaatactagatcctttgtccaatgaggtgt

SEQ ID NO: 17291 - DNA, 413 bp, Glycine max
  unsure at all n locations
agcttgagttcatgattcanaagaaaacacctcgtaataaagccaatttagttcgacaattggtgaagttggagtataaggatggtcatagtatgattgagcacttgaataattttaaagggctcgtaaatcaattaaccaaaattgagatgaagattgatgatgagttgcaagcccttctactccttagttccttgctggaaagttgggacacactcgtggttacacttagtaactcagctccagaaggaaagctcaccatggatacagtcagtgacagccctctcggtgaagaagcaagaagaatggaacgaggtgagtctatccatcccgaggctaatgttattgagaatcggngtaggaatgagactcgtggatgtaataagagccgagatctgagttttcccaacact

SEQ ID NO: 17292 - DNA, 414 bp, Glycine max
  unsure at all n locations
acgtgcatttgtgtgcaatacacaatttcttgtacactacaacaaaatggtgtatcagaaatgcgtaatagaactttaatggatatggttagaagtatgttaatcaattagactttacccgtatctttgtggatgtatgccttgaaaactgtcatgtatttgttgaacagggttcctagtaaggcagttccaaagacaccttttgaactatggacaaataggatacctagtataaggcacctgcatgtttagggttgccagacagaaataaggatttataatccgcaagaaagaaaattggatgcaagaacaatcagtgaatatttcattggttatccagaanagtcaaaggggtatatgttntattgtcctaatcatagtatgagaaatgtcgaaactgaaatgcaggttcat

SEQ ID NO: 17293 - DNA, 403 bp, Glycine max
tttgctatgagcaaattcaaacgacaataaccttttactcggatgtctgattgagtcccgtaatatatcgagacgctcgaaattgaatgttgaagctcagagcaaattcaaacgacaataactattttctcgtatgtttgattgagtcccgtaatatatcgagacgctggaaattgaatgtttaagctttgagcaaattcaaacgacaataactttttactcggatgtctgattgagtccagtaatatatcgagacgctcgaaattgaatgttgaaactctgagccaattcaaacgacaataactttttactcggatgtccgatttagtgacgtaatatatctgggtcgctcgaaattgaatgttgaacctctgagccaatccacacgacaataactttttac

SEQ ID NO: 17294 - DNA, 346 bp, Glycine max
ccgcttaaacattcaatttcgagcgtttcgttatattacggttctccaatcagacatccgagtaaaaagtgattgtcgtatgaattggcttatagcttaaacattcaactttgagcgtctcgatatattacgggactcaatcagacatccgagtaaaaagttattgccgtttgaattggctcaaaggttccaaattcaatttcgagcgtctcgatatattacgggactcaatcagacatccgagtaaaaaagtattgtcgtttgaattggctcacaggttcaacattcatatttgagcgcccccatatattacggcactgaatcggacatccgagtaaaaagttat

SEQ ID NO: 17295 - DNA, 429 bp, Glycine max
tgaaggtaaactagatgccttggttaacctggtaacttatctggccatgaataaaaaatatgcacctgtcgccagactctgtggtttatgctcctctgccgaccaccacacggacctttgcccttctgtgcaacaatctgaagcaattgaacagcctgaagcttatgctgcaaacatctacaacaaacatcctcaacctcaacagcaaaatccgccacaacaaaatagttatgacctctccagcaacaggtacaatcccggatggaggaatcatcccaaccttagatggtcaaatccttcacaacagcagcagcaacaacaacaaccttattttcaaaatgttgctggcccaagcagaccatacattccaccaccaatccagcaacaacaacagcaacagccccagaaacaacaaacagttgaggcccc

SEQ ID NO: 17296 - DNA, 412 bp, Glycine max
agcatacatatatattttttgacaacatccgtcatgcctgcattaaacatgattcttcttttgtaggaattggccaaaatggtgatagttcaacaacttttcctataataatcagcgttggtgacaccagctgagcagatgtaattttctcgtgaaggtcctttagttcagcaaacacctgcatcatagcaaaataatcagctattggacctagcatccggaaaagttgaattaagaaccagctatatatagattcacacacaattgtatttatttatcagtttttaatatcaaccatgcagaagtacaaaataaaatgtctcatattcacaactacctcctataacaaaacattattaagatcactatattctattagcctcgactttagtgtcaggtacactctcttcac

SEQ ID NO: 17297 - DNA, 408 bp, Glycine max
  unsure at all n locations
tctgcttcttcatcgacattntttctctctcttcatcttttctttacttcatcgacacatgatatgtcttctaaagcgtaggaaggttccaaatgcgttgtggtgggcattgtgttgtgcagtatatgattgcagcgtctgccatccttttccctggacatgtaggcagagttactccacagagtgtaacttatagctttgcaacccttttgcttgacctcctcagtggcaatcatattcctccaagccatgtaagtttctttacttaataaaaagttatgcaaacaacacttattgtgttgtgtcctataatgttgtctatcttagtctaattgagttcttccttttgatcaatttcttcttctgattgttctacctanaatcaagtaagaagtacctgtcaaaaaa

SEQ ID NO: 17298 - DNA, 405 bp, Glycine max
  unsure at all n locations
tcttatccaaggctcatcttggtggtgaagctccttcttccaagcttattccctagtggatggcgcctcctctctcctcttctcctttgtcttccgcttcatctccatggtgaaaaatcaccatcaaaggacctcattgaagctcaaagatccagcctccatagaagccccacaagcaagcttccatcacaaattccgcaccagcatgattggagtaccgaccttaagtgttaatttgtgattaggtatccctgatgttttcaatgagtttagaaatttaggtgtcagtaatccgaaagtaggattgagtagttcatcttatttatcaatgttatcagtgctacaatactccttttcgtcattgggtatcaatgataagacnaataatnntatttgtcaacaata

SEQ ID NO: 17299 - DNA, 379 bp, Glycine max
  unsure at all n locations
agcttaagctccttcaactgcacaaggttcttaatatttgaagagtatccttgtggaaccttcacccgacgaagacactgacaaaaacttatcttttccttcttggacaaagcatggcaggctgggggcaagtaaattttcttcccatcagaccttggatgcaactgtgatcgtatacccatatcaactagatcttgacgggtattcaagccatccttcgtcttgccttgaatgttaaggagtgtgccaatcacactgtcacaaacattnttctccacatgcataacatcaatacaatgtctaacgtcaagatcacaccagtacggaagatcaaagaaatggatctcttctttcatatgccactctgacttttatcctt

SEQ ID NO: 17300 - DNA, 427 bp, Glycine max
tactatatttaacagctagcagacccgacatcacctatgcagtaggtgtttgtgcaagatatcaagccaatcccaagataagtcacttgaatcaagtaaagagaattctgaaatatgtaaatggcaccagtgactatgggattatgtactgtcattgttcaaattcaatgctggttgggtcttgtgatgctgattgggctggaagtgcagatgacagaaaaagcacttctggtggatgcttctatctgggcaacaatcttatttcatggttcagcaagaagcagaactgtgtgtccctatctactgcagaagccgagtatattgtagcaggaagcagctgttcacaactagtttggatgaagcagatgctcaaggagtacaatgtcgaacaagatgtcatgacattatactgtgacaacctgagtgc

SEQ ID NO: 17301 - DNA, 403 bp, Glycine max
ttcctctagctgttctgataaggtttccaaacgttagagaaggagaagagattgaagccttcattctactgcctgcatgcaatgaatatttctccctaacaagatcaattttcaaatcgcaacggtgaaaatatgcagaaatgaatttcgaaccaggtgtcccaatttcacaatgatccaacggttaatgagtctgggattatagttttactaggacaggttttgggtctctgcaagaaaagaaaaagttaagatgagaagggaatttctctcacctccaactctgattcgcaatttccatcggtgagaatacttgaatatgagctgcaaacttggtgctcaaatttcacaacaatccaacgattaacgagtccaagatcattgttttactgagacagatttg

SEQ ID NO: 17302 - DNA, 409 bp, Glycine max
  unsure at all n locations
tttcttccatatgataagagcttatcaaataagcatgatttagctgtttacacaaacacaccatttatgtattaaatctaacttgatagcttaagattaaaaaaaggaaaaaaaggtttgtcatgcctcaaataaaactggctttttcttttacactggcatcgtgggtgggtacacattctggtaacaaataattacaattattcctacaaaataatccagaccaccccatttgtgtgcagcactagcgctactagatggatgataaaatgggaggctttaatagatgtatgtttcttgtggattgttataagaaccaactntgttcacccaaaggttaactagttcatcacgttgatactacaacaaaatagaatacatccttttaaaaacaaaagttgttcaccac

SEQ ID NO: 17303 - DNA, 378 bp, Glycine max
  unsure at all n locations
tgcaccaacttctcattntatgcataatatacaagtttatattttaatttaatgtttagtaacacgactaaaatccgtagtaagatgaaaaataaattttcaatttaatacttattagcgtatatttaaaagaaagctgttagaaattagtaattattgattatttttgggacatgtaagaaagacattatgtgtgctttttttagcgagacaatgttatttggtttaatagactaataatgtaatttaacatattgaaacatcaaattataaatattctgtacaaaattaatggtatatagatgctggatgtatttattcagcataaaaaggttcctggatgtattttattttttgagactggccgtctctatcttc

SEQ ID NO: 17304 - DNA, 409 bp, Glycine max
  unsure at all n locations
tgcatgtaagatactgcaacttcttgctgatcacgaatatcttgcagtatttcccttggtttgtattgtggattatctcgaatgcgtgcttcaacagatcttgcaacccaacctactgatgcctgctgatgatgaaggttctgaactccctcgcaagtatgctctccgtgtagagttcttacagtaaaagttggaacaccgggacactttgctacatggacccgccatgggcacccttctttggagcattntgctataaaacgactgcgatctgacttaactatcctaagatcaaaatgcatagcaatggcaatatctttcagtgttcttcggcagggtttcacatctgcaaactcttgcccaatgactaacggctgctctgctacagtaacagtactaacagatgtgt

SEQ ID NO: 17305 - DNA, 383 bp, Glycine max
agcttgtaataatcttatatagaagtatgagattaagttcctgagtggaattttgatgcaatcctcccatggagggggcccatcaccagagtcatggttaagagactccaggaagattgggccagggatgcaagagaatgccttagggttctcatgagccttagggtagcttttgggcccatgggttaagtatgtgcccacttatctttgttcatattagattatggtttcattatttttttgggccttgatttagggcaccacagtgtagggagggtaccccataagtttagggtaccctagtaatgtaggatttttcagcccttgtattttagggctcacagactagtttttgtatcagggatagttttgtaatttcacat

SEQ ID NO: 17306 - DNA, 377 bp, Glycine max
agcttcaagagatcatcctctctacaacattattggtgatatctcaaaaggggtaacaactagacattctcttaaagatttatgcaataatatggcttttgtatctatgattgaacctaaaaatataaaagaagtcatattagatgataactggatcattgccatgcaataagaactgaaccaatttgaaagaaacaatgcgtggaaattagtagaaaaacctgaaaattatcctgtcataggaacaaaatgggcctttagaaataaattatatgaacatggtataattattagaaataaagccaggttagtagcaatagggtataatcaagaagaaggactagactatgaagaaacatatgctcctgttgcaagat

SEQ ID NO: 17307 - DNA, 283 bp, Glycine max
aatcttattgcaaccacgagattcagctcctgagaggaatgtacgtgctataactaccatggatggggcgccatcaccaaagtcatggttgacagactccaggaagatcgagccaaggatgcaagagaatgccataaggccctcatgagccatatggtatcgtatagtgcccatgggttaaacatgcgcccactgatcattgtgcatattatatcatggtaacactatttggtggagcctcgactcatggcacgacattgtatgcagggatccacataatgtt

SEQ ID NO: 17308 - DNA, 417 bp, Glycine max
ctataaaactcagcttctaaacttgtacttaatgaagctcttataccatttgttaaacaagtggcctcagatatcttaagaaggggggttgaattaagatatcacagactattccccaactaaatattctacttttaatttgatccaacaacccaaaattccctttaaaaatgaactcctaaataataatgcaaattaattcttactgaatagaaataataagcaataaacaataaaggagtttaagggaagagaaaatgcaaactcagatttatactggttcggccacacccttgtgcctacgttcagtccccaagcaacccgcttgagagttccactatcttgcaaaatccctttacaagttctgaaccacacaaggacaacccttcctttgtgttcaaatttctttacaacaag

SEQ ID NO: 17309 - DNA, 375 bp, Glycine max
  unsure at all n locations
agctttggtcctattcaaatagccataacttttgacatgggggtacgattgaggcccatgatatatcgagaggctcgaaattgaaaaatggaagttctcgagaaattcaaatggtcataacttttaacttggatgtccgattcacgcacataatatatcgagacacacaaaattgaaaaatggaattctcgagaaattcaaatgttcataacttttgcctcgaatgtcagatttaggcacataatatatcgagacgctcgaaattaaacaagaaagctctggtccaattcaaacggccataacttttgacatgagtgtatgattgacgcccatgatatatagagacgctcgaaatngaataatggaagttctcga

SEQ ID NO: 17310 - DNA, 402 bp, Glycine max
  unsure at all n locations
ngagcgtagtggaagaaaagttcttgatatagatttttcctccttctagatatatcagtgcaaagtcagatgtttccactttcaagttaaaaccagatgaacccatctgtgaagtctggaagtgattcaaatcattgttgagaaaatgtcccaatcatggttttgatgatgttacccatctaagcatattttgcaatggtctaaggcctaaaactaagatgattctggatgcagtcgctagtggaacaattatgtttgtagatgttgaacaagccacaaggataattgatgcctttgcttcaactgatcaccaatctcagcataacagacaatcgatacataaaagaggagtgttggatctcattctcaagggtctttcaatggaagtgtataaacattttg

SEQ ID NO: 17311 - DNA, 321 bp, Glycine max
agcttgccgccatggaagtttccgactatgctcttgtgtggtggaacaagctacaaaaggagagagcaagaaatgaagagccaatggttgatacatggacggagatgaaaaagatcatgaagaagcggtatgttccggctagttactcaagggacttgaaattcaagctccaaaaactaacccaaggcaacaagggggttgatgagtatttaaggaaaaggatgtgctcatgatttaagcaaatattgatgaatatgaggagggaactatggctcgacttcttaatggtctgactaatgatatccgtgatcttgttgagct

SEQ ID NO: 17312 - DNA, 310 bp, Glycine max
atttctcatgagtttccgttgttcttttcgagcgtgtagatgacgtatgtccccgaatcggacatctgtgtgaaaagttatgaccattcgatcttctcgagagcttccgttgttcaatttctagcgtctcgatatattatgtccccgaatcggacatccgtgtgaaaacgtatgaccattccattttctcgagagcttctcgtgttcaatttcgagcgtctagatgagttatgtccccgaatcgaacattcgagtgaaaacttatgaccatgcgaatctctcgagagcttgcgttgtttaatttcgagcg

SEQ ID NO: 17313 - DNA, 402 bp, Glycine max
atgaccgatcgtttacaaaatatcttttcaacgtgttattctccttgctaaggaccaatgcataggagttgggattggcttggagaagatctttatcaagatcaattgagatcagccctgcactgtggcccatcccaccaaggttgtagctctttatatctccccgcagcttgcaatgattgacaatcattgccgaaagtgatggagtatggttgaacagactacactttacaatcagaattccaatgtctttatgctttacagacggtttagctaatagtgcatcaatggcaccaaacatcacagcctcggcttcttttctaacttctttcattgaatggttgggaggaatgttgaggacatcctcatgatggtaagtgctctccccaatgtcagatctct

SEQ ID NO: 17314 - DNA, 312 bp, Glycine max
agctttgttcaggatttagaaatttccaccatgtttactcatcaccagaaaattgtagtcgtggatggtgaattgccgagtggagattctaataagagaagaattgtgagttttgtggggggtattgatctctgtgatggaagatatgacactcaattccattcacttttcagaaccctggacacagcacatcatgatgactttcatcagcctaactttggtggttcttcaataaaaaaaggtggtccaagggaaccttggcacgacatccattctcgacttgaaggccctattgcttgggatgttttgttc

SEQ ID NO: 17315 - DNA, 414 bp, Glycine max
tgaattgaacatcggattgaagaagagcgcgagtgatgtcgttgaggcaatcgatgagcaccttctcgtcgattactgtcgcattgctcatcagctggagagcacgcgaaatgctcccacctaactccgccagaaccatcttgatcttcttcccttcaacaattcaatttccaaattaaggtttggatatgcaacaccaacacggaggtttcagattcagattattggtctatctctcttccaccgccggtaaaatgagcggtgcattattgggagggaaaaaaagttaaactgtaaccactacatactaatgggccttggctcggattgagccttcatattgtaacccatgtcatgtgttgatccgtacgtaactgtattacatgaagaagcttgttatgtggtgatggaaaa

SEQ ID NO: 17316 - DNA, 426 bp, Glycine max
ctaagcttatctttttaataagtcatattttctttatgaatgtgcaaaaaatttaacttatgcttaaaaaatttaattatttatcaactttattggaccttatttgttatgtaaacacttgttgtttcatgattgttctaccaaaaacatactccaatgaccatttcttaataagaatcaatgtttaataagttttcaccatatgaacaccttgtttgagatgccattagacacaaataaataattcgtcccacatagctcatctttaataataaaaaaagtctaatgccgatatttattgttcagtgaagtgatataattaagttagttattttaatgattaatatatttcgataattcaaagaatttattgtcaattaaccaagttaataaccatcactcccgtcatgggaaaaaaaataaagt

SEQ ID NO: 17317 - DNA, 406 bp, Glycine max
tttgtttatttattaaatcatatattacatgaagttgttgggtgcaaataagtctttctaaattacaatttctattattttatatacttaataattgactgattatagtaaaaaaaacaataataattgactcataatcatacctccctagccggcttgtgtgcaatcaacaaaagctatctttcgttttatagactctataatctctttttgtctttgagagtgactctatataatttcataattgcatattaggtattaatatatttaaagaggcttgctagctagcgtacattcgtttattttataattggaatacgttagtaagttttaactaaatattatcttcaaatatattcacaatgtagctggctaatatacaccaattgaacaacaagttaatgta

SEQ ID NO: 17318 - DNA, 346 bp, Glycine max
  unsure at all n locations
ntgaaaaacactttttattttatatcacttggccattctctttgcttattcaattaggaattcccttcctaatattctagtgatcatcttgatgttgtgacttgtaatcttgaagtattgtcttgaattttaatcttgaaaagcccatttgcatcaattgcaacacatcatcatgatcatcatcaaaacatcaaagccaattgcatctacacatgtgtcctccaccttcgagattggagctatgtttcacgattgcctaagtgcggaccctcaaggcaatccgccattcttcctttttttatcggaaacccatgaatgttattgcctagcgctattcatgtgccct

SEQ ID NO: 17319 - DNA, 421 bp, Glycine max
tgacggactataccaagctctaggaaccagggacgtagaaagatcttatataggcttactaagggtagagagaggaagactacagatttggatcacgtaaagtgtgttaaggatgaagaaggcaaagtcttaatgcatgaaaaagatatcaaggaaaggtggaaggtgtatttccacaacttatttaatgatggatatggatatgactctagcagtctagacacaagagaagaggaccggaactataagtattatcgtcggattcagaaacaggaagtaaaggaagcgttgaaaagaatgagtaacggtaatgcggtggggccagactacatacctattgaagtgtggaaaactcttggagatataagtcttgagtggctcaccaaactctttaatgaaattatgatgtcaaaacgcatgc

SEQ ID NO: 17320 - DNA, 409 bp, Glycine max
  unsure at all n locations
tgcatttgtggngattggcttttattccctaatgtatgatcataaagcccaggaacttgcctttgtcgaccccaaaagttcattttttcggttgaggcacatgtcgtatttgcaaagctctttgaagacttcttctaggtctgccacgtgttgagttatgctctgaaacttgatgaccatgtcatcgacatagacctcaatgttttgtccaatctactacttgaaaatctggtccatcaatctatggtatgtagcacctgcattttttagggcaaagggcatgaccctatagcagaagttggcatcctcagtgatgaatgtcattttctcctcatttggagcgtgcatccggagtagatgtctaggaagcttagtacttcgaacctggacgctcgatcaaatagcttat

SEQ ID NO: 17321 - DNA, 327 bp, Glycine max
agctttcttttatcagagaagaggctattctcttggtccaagcccttggagcttgctttaagccatacaatgccttaagcaattagaacactctatcttccttgccttagatctccaaactacgaggttgttcaacaaaccacctcggttgccaaggtaccacttcaggtaaagctgacatttacattaatctgggtataaagaccaatctctattatgggcttgcgcaattaccaaccttatgggttcaagcctagctactggaccataacttcagaatgatccaaaccagatttttggaggacatcctttgcaactaaccttgct

SEQ ID NO: 17322 - DNA, 312 bp, Glycine max
agcaacgtttattctcagcattatttaattttttgcttcggaatggaggcttccattcaaactagtattactgatcttaatgcttgaatttactttgcagattctacttcgattatagtacaacctttgtgggagcacgaaagatttgcttccatcctgtgaactgttctttgctccttgtgactgtgctcctttatggggttatgtatccgctcattgatcggcttaaaggaaactggtctccagaccactttgaataaacttacttgatgggcttatacggatataaggtatttggttcaattgctctaa

SEQ ID NO: 17323 - DNA, 381 bp, Glycine max
agctttaccgagtgtctgaaagcctcatcaatggtagagaaccactccctatttccacacatgtgattgctacaaccggagtcgagaaaccaagtctcttcttgttgcaagttgtcagcttcgacaagagacatgagcagcatctcttcttcttcataaatctcagcatagtttgcactctccttccatcttgggcattcgtattggaagtgtcctagtttgtggcacttaaagcactccactgtggctttgtttggagactgccttcctctgcctctgcctcgaccccgaccaaagcctctacctctgcctctacctccattctgttcttcatgtgagaccttcaatgcttgctcatcccttgtgtcactaccatgagaa

SEQ ID NO: 17324 - DNA, 385 bp, Glycine max
  unsure at all n locations
agcttatgctgcaaacatttataatagacctcctcagtagcaaaaccaacaacaacaaaataattatgaccttttaagcaataaatacaatccaagttggaggaatcatctaaatctgagatggacaagtcctccacaacaacaacaacctatccctccttttcagaatgctgctggtccaagcaagccatatgttcctcctccaatatagcagcagcaacaatagcagccacaataaagacaacaagcagctgaggctcctcctcaaccttccttagaagagttagtgaggcaaatgaccatccagaatatgcaatttcagcaagacacaagagcctccattcagagtctgacaaattagatggngcagatggctactcagttg

SEQ ID NO: 17325 - DNA, 376 bp, Glycine max
agcttgaaggacattcacgaagtgtgactatatgatgtggcaatggggtgtagcaagaaaatgctcacctccccctctaaaatttaattgtattgggcttcttccaattcaattaaatttagttcccaacacccacatcaaatattcacttaattcatgtgaaattacaaaactacccctaatacaaaaactagtctaggtgccctaaaatacaatggctgaaaaatcgggctcatacttagcccatgggcccaaaatctaccctaaggctcatgagaaccctagggccttctcttgcatctttggcccaatcttcttggagtcttctatccaatgcccttaggggtaggattgcatcattccctcccccttgaaa

SEQ ID NO: 17326 - DNA, 399 bp, Glycine max
agcttccatcaagaagtgtggtgagtaggtgcataaaaaatgagatgatcttcttgtatggattgctaaggaagattatcaccgatgatgccaccaatctgaacaacaggatgatgaaagaaatgtgtgaggatttcaagacccaacaccacagttctatgccttacaggcccaagatgaatggggcagttgaggctgctaataagaatatcaagaagatagttcataagatgtctatgtcatacaaggaccggcacgagatgctaacctttgagtcgcatggttatcgaacttcagtgtgctcattgactggggcaacccctttctctttagtgtacgggatggaggctatgctcctgtttgaggtagaggatccttctttgagaatgctagccgaat

SEQ ID NO: 17327 - DNA, 428 bp, Glycine max
ctaagcttgttcatcttgagataataggtggtcatcctcatttgtagatgatggtgttacatacttctttggcctaacaggaactccaatatttttacagcttctaatgttatgattggtttggccacaccttccacatgtaaactcagccaatttcctctttagcttgtcctgtgacattgtcctcatctacagatctacttctatttttctttggccttcctctttggacctttttatgtggtggaacagggtgtgtatactgtgtctgggcccaatattgtggtccttggactggctcaataaaatgctggcatgtcttattataagcttctattgacagccactcatgacacatgttctcaggcttccctcctttgagagttattgttgcaatggcatgtccgcatgacatccctacatcaaag

SEQ ID NO: 17328 - DNA, 374 bp, Glycine max
  unsure at all n locations
agcttaacaaaatgcatgcgaagtgggtggaattcctagagcaattcccttatgttatcaaacataaaaagggaaaaggtaatattgtagccgatgctctttctcggcgtcatgcattactttctatgcttgaaacaaaattgattggtcttaaatgtttgaaaagcatgtatgaaaatgatgaaacttttggagaaatttttaaaaattgtgaaaatttttcagaaaatggtttctttagacatgaaggctttcttttcaaagaaaacaaattgtgtgtgcctaaatgttctactagaaatttgcttgtttgtgaagcacatgaaggaggtttaatggngcattttggggtccaaaagactctagaaacatta

SEQ ID NO: 17329 - DNA, 376 bp, Glycine max
aagcttctcaagcattccactcattaacaaacaagagacgatggcctacaaatgtatcatatatagcctcattagttattcatctgtagtgtcaaattataaagatttcatgtctaagaagctccttctacttcaatcaattcttagactttagtctccaaatgggatgttataacttgtacgaattccagatgagcttatcaagaatgccaagtacatagccacaccatggaaggggatcctggcagcagatgagagcacgggcaccatcgggaagcgcctagcgagcattaacgttgagaacattgaggccaaccgccaagcccttcgcgagcttctcttcaccgctacatatgccctccaatacctctctggg

SEQ ID NO: 17330 - DNA, 392 bp, Glycine max
  unsure at all n locations
agcttggttaggatgcttcaatggaggaaaagaatgagagagagaaagagagaggggggagcacgaaattgaaggaagaaaaagagagagaagttgaactttgagttgtgatgcaatcctccctaggaagggaccagtcactagaaccataagcaagagactccaagaagattgggctagagctgctgaagaaggccctagggttctcatgaacctcagggtagatttctgagcccatgggcctgtgtccaattatctttgtacatattagactaggatgtcattatatttggtccttgtatttagggctccatattgtaggtagggtaccctagacatataggattttttcagcccttgtattttagggcacctagactagttnttgtatt

SEQ ID NO: 17331 - DNA, 411 bp, Glycine max
  unsure at all n locations
ntatcgtcagtctcaaacttggcctagtctctatttttcaaaacctatcatttactttatctattgtatttttattattttataaaaagaaactctattttattgtctatcaaatgaataaataaaacattcttttattttctctcaaatcattattttaattaataaaggcatttctccttatttatttaattataaaaacctcatcattttttctaaaaactatttatttataaataataatcccttataaattagtttacaaaaaatgaaatgttacaactgagtaatccaaatgacaaaattaaggttgacaatcacgaaaatattgcgttgagtaggtgatgtacataatcattataagaaaaatatgattaaccttaatatataagataaatattaagttaattt

SEQ ID NO: 17332 - DNA, 385 bp, Glycine max
agcttcaatgccactaccttatagggattatgcctttatttatagtgtctacttgataaatcgacttccatcctcatctattcaatatgaattgacttactaaaaactatttccgaaattaccagattatagcttcttaaggatctttggttgtgcatgttttcctctattttgactatatagctcctctctcactaagacttgctcataatgactccaaagtttctcttgaagattatccaaaaaaatctattatgaccctgaagcaactatctagcaatgccattaagccttcttatcaatcttcttttttctttgaaaatattgccaaaagagttaacattccaatctttcaaagcatgttggatatgtttgaccctttgac

SEQ ID NO: 17333 - DNA, 290 bp, Glycine max
gttgtgcagagacactctatgttctcataccaaaagcttaattatacatactgctatgaatttttaaaaaaaataatattcttaataaaggatattttcatgattatgatctctaatccatttttcacacgtatgtttatggtaatgcgatcattcttgtttaactatttggatacagttaaaaatcttttatattatattaactcatatatgtattaaatattaaaatatcaataaaaatatgattactctttgattttaaaaaatatctaaaattctcatgactacca

SEQ ID NO: 17334 - DNA, 442 bp, Glycine max
  unsure at all n locations
tcttacaagagactaaganacttttgtctaanaattttgagacgaaagatcttggggaagactcttttgtattaggaatcaagatactaagagatcgctttcaaggtatcctaaggttatcacaagagagttatatcgataaggtcctagatagattcaacatgaaagatagtaaaccaggagataccccaatagctaaaggagataaatttagtctcaaacaatgccccaataatgaccttgaaagaatagagatgtaaaagattccttatgcatcaacagtaggaagtttaaagtatgctaaagtttgcacttgtcccgatatagcatntgtagtaggagttctgggcagatatttgagtaatcctggaatacaacattggaaagcagtaaaacgtgtgatgcgttacctaaagagaacaanaggatacatgctcacata

SEQ ID NO: 17335 - DNA, 386 bp, Glycine max
agcttggtaagatcctccttggtggggatgtgacgtgcaccgcacacactcacgagctcctcacgtgcccgtatctgccactgcggatgcatcgcgagcaggatcgtggtccacgttagcaaattcgaagtggtgtgtttgcctgcgaagaaaaaggttttgcactcttccactatgtcatccaccgttacgttcacattggaggtggtgttgttgttgttgttggaagcccaaatcatgagccccagcaaatccgttggcctttttgtttcttctttcccacacgcattctcttttcttcgtcgttcgatgatcttcaccaacgatttcttgatttccttgtccagtttccaagaatatatattcctcctcgtggggaagaatct

SEQ ID NO: 17336 - DNA, 445 bp, Glycine max
  unsure at all n locations
tgcttctacaccaaacctgaagcatccacctccaccataaagaattttgttaagtcaggtaaagccaaaactggagcctcagtagcttcttctttaattgttgaaaagccagttttgttgcatcagaccagataaagttatcttttttaagcatgttagttaagggtttagcaatgccaccatatcccttgacaaaccttatgtaatatccaattaaccccaggaagcctctaagttgtttcaaagtttgaggtaatggccactggtctattgtgtgcactttagctggatcagttgataccccctccttagaaatgaagtggccaaggtactctaccatagacaccccaaaatagcacttactcttcttagcagacaaggaattcgccttcatagttatcacaactttgtgtanatgtagcaaatggtcttccaatgaacaatt

SEQ ID NO: 17337 - DNA, 427 bp, Glycine max
ttttctctggctgttttgttaggattctcaagcgttatatagagaaagaaaggattattagtctcaattttattgtctccgtgcgacggatatttctctctttacaaacattatttcaaaaatcccaacggtgaagatgtgagaatttgaggaccatacgcggagtctaaatttcaggatgatccaacagttaacgaatccaagatcatagttgtactgtaataaatttacgtgtatgcgaaaaaaaaaggaattttgagagaggaaggaagacgaacgaatttatgaggaagtgagagcgtagatcaatatcaaaattgacctaatatgtttctatctatagttagagtattctaaacttattatctactctattattttatcttatcactttataaaaaaaagaactctctattactatgtcatt

SEQ ID NO: 17338 - DNA, 353 bp, Glycine max
agtttgcttttggagattgtaactatgctcttgtgtggtggaacaagctacaaaaggtgagagcatgaaatgaagagccactggttgatacatgggcggagatgaaaaggatcatgatgaagctgtatgtgccggctagatactcaagggattagaaatttaatcttcaaaaactaacccaaggcaacaagggggttgaggagtatttcaaggaaatggatgtgctcatgattcaagctaagattgaagaaaatgaggacgtaactatggctcaatttcataatggtctgactaaagatatccgtgatattgttcagtcgcatgagattgttgaaatggattatttgcttcac

SEQ ID NO: 17339 - DNA, 441 bp, Glycine max
tattgcatgagctatatcaggttgagtacatgccatagcatacattattgaacctataatgttagcatatgtgatactctccatataagtatactcttcagctctctttggggattgacttacacttagtttgaattgatcatatataggtgtcacaataggccaacttcgaatttgacattccaaacctttcaataaatttattgaggtatgtctcttgagatagatacaaaatcttcttctttctatcccttttgatttccattcccaatattctccttgttgtcccaagtccttcatttcaaattccctttctaactcagctgtgaccttggtaatttcggccttaccgttacttggtattaacatgtcatcaacatatagcagtacgattacagaggtacctttattccttttgaatagccattttcaattgactac

SEQ ID NO: 17340 - DNA, 393 bp, Glycine max
tatcttactataaataacaattaatatttattatcaaataatagtgtaaaaataatttatactatctatatatgtataaactatttgctcttaaaatttaaaacaaaagaaggaagattaaactcttgtgagagcacgggaaataaaagtatataactgagtcaaaggatgtatgcttagagacaaaggatgcatgcttagagagttattatgaaaatttaaatgtccaacataggtatattaaactaataattaatctacacattaaggaaattactatgggaaattactatggtatattggtagtgacatgaagataatatgtaataatacggtgagttattaactatttgttaaataatgattctatactaaatgttcgaaattataata

SEQ ID NO: 17341 - DNA, 378 bp, Glycine max
agcttggtgccactcttgaaacaaaacaccaaggttcgacatatcgtgttcatcatctgggaactcccaatctaaatcgagaccattgaacccgtattggcgcgccacgtggatggtggagtttatgaacacttgtcgtgtgtgtttgttgctagccatgagggagaatgcggttgagttgctaccacctcctccaattgacaagagagttttcaccggcgggtaacggtagcggagtccattgatgaattttggtatccatttttcatcaaattcggtgacactaaggtgaaaaagttgagggtcttgttggataaaggcatagtagatatgagtgaagtattttgtgtcaatggaagagggtgaaaggtcatcacc

SEQ ID NO: 17342 - DNA, 459 bp, Glycine max
  unsure at all n locations
tcatgatgatgaatcaagtataaatcaagtagttntgatgatgacaactagcccaaaagaatgatttcaagtttgagtcaacaagttcaagatcaagattaatttcaagattcaagaaaagacatcaagatttaagagaagatgaattcaagattcaagagaagaaatcaagaagcaacaagtcaagacttcacaagggaagtattgacaaagaatttttcaaaaaccaaacatagcacagttttgttttacaaaagagttttctcaaatttttctaagttaccagagtatttactctctggtaatcgattaccagtttactgtaatcgattactagtgataaaatttgatttcaaaaagtttttaactgaatttgcaacgttccaaaagaattttaaatggtgtaatcgattacaatatattggtaatcgattaccagtgtatctgaatgttgaattc

SEQ ID NO: 17343 - DNA, 451 bp, Glycine max
  unsure at all n locations
actcagcttcttacatagtccgcctttgcttgaccttctttatgtttaanaacattaacattaggcataggcgaaagatcacgacgagtctgtgggttaaaaccataaacaacttcgaaaggagaacaattagtggtgctaaaatccttcacaaatcatctataaaaacttgctaagccatgaaaactcctcacctcggtcacggacttaggtgtaggccattcttgaatagccctcaacatttcctcatcaacttgcactccttttgaactcacaacaaaaccaagaaacacaacatggttagtacaaaagatgcacttttcaagattggcatacaattgttcttctctaagcacaatcaagacagattctacatgatcaatatgcaaatcaagtgaagtgcttagataaaatatcatcaagtcacaccacacnaactttctataactct

SEQ ID NO: 17344 - DNA, 430 bp, Glycine max
  unsure at all n locations
tgtaatggcctccaaaattttagacaagtggcctctgtatcttaagaaggggggttgaattaagataaaaaactttccctaattaaaattttaactatgttttggattaacaatgcaccccagttgcccaatcaaatagctaggtcactcgaatgaaactagtgtccttatctttacttcccttttatttccaataaaagataagtaaagaagggcaactgtcataccctaatttcgtccagggactatcattcatggatattttgattttcgctagccgaattgagttgttcgacgcctattaccacccaagacgaaagatcattcgacgttntggtgaagaatgcgaanaatacccaaaagggagggcaaaagggtcattnntaatcctttttttgaaccctagctcgcccaggctagcctctagctc

SEQ ID NO: 17345 - DNA, 317 bp, Glycine max
tcttagtttcagatgatgcagatggttttgtaactatctcatgcactcctctaatgactatggcatcatttctggcgctaaactgctgggagttggaggccatcttctcaattaaatgtctggcttcaacaggggtcatgtctccaaaggctccaccactggcagcatctatcatacttctgtccatattactgagtccttcataaaaatattggacaagaagctgttctgaaatctgatggtgggggcaactggcacataaaatcttaaatctctcccagtactcatacaggcatctctcactgagatgtctaata

SEQ ID NO: 17346 - DNA, 385 bp, Glycine max
ttgctttctctttatgaataatgtggtatccactttacctctggagaattctttttcaagaagaaaattacttaatcgttcataccatgccctaggggcttgtttcaaaccataaagagccttttgtaatttataaacatgatttggtttattagaaatttcaaaaccagggggttgttcaacatatacctcttcttgaattaagccatttagaaaggcactcttaacatccatttgataaagtttaaagttcattatggatgcatatgccaaaagcattctaatggcttctaatcttgcaacaggagcatatgtttcttcatagtctatcatgtaaacattattgactctatgtcctacatgctttatattaatgtcatgctta

SEQ ID NO: 17347 - DNA, 389 bp, Glycine max
agcttaataaatcaatctatggcttgaagcaagcctcctgccaatggtatttgaagtttcatgatgtcgtcacttcatttggctttgaaaagaacatcatggatcaatgtatataccaaaaggtcagtgggagtaagatttttttcttgtgttatacgtggatgacattttgcttgcaactaatgataagggtttgctatatgaggtgaaataatttctctcaaagaactttgatatgaaggatatgggaaatgcattttatgtcattggcattaagatccatagggaaagatctcgaggaattttgggtttgtctcaagagacttatattaacaaatttttagagagatttaacatgaaagattgttcaccaagtgtagctcccattg

SEQ ID NO: 17348 - DNA, 389 bp, Glycine max
agcttaagcgtcttgttcaatcaccaaattcgttcttcatggtataaaaacgttcttctaattgttattatttgaaatagaagttcttatttgaagcatttcgtatgttttaattatttgttgtaggatgtcaagtgccagggctgcttcaacatgtaagtaggatctttctttttatttgttttaatgtgattataatgataatttatgtaagtgacgttaatttggttatgtgcctttttttttaatttggatgcagaacaactgtgtttagccactcccagacagttgtagtatgtggtaactgccagactgtgttgtgccaaccaacgggtggacgggcgagggtaaccgaaaggtgctcttttatgaagaatggagattgaatg

SEQ ID NO: 17349 - DNA, 451 bp, Glycine max
tgcttaagaagattgctaaagaagctagagcttatctactacatacttctctaatagctaagctcacctccttgagatgagaagctagaacttagctacacaccccctataatagctaagctcacccccatgacaaaaaacatgaaaatacacaaaaaagtccttactacaaagacaactcataatgccccgaaatacaaggctaaaaccctatactactagaatgaccaaaatacaaggcccaaacgaaggaaaaacctattctaatatttacaaagataagcgggatcatacttagcccatgggctcgaaatctaccctaaggctcatgagaaccctagggcctacccttggatctccagcccaatctacttggagtcttctacccaatgcccttgcacgataggattgcatcagatgattaggatattttatgcaaaacagggcatgc

SEQ ID NO: 17350 - DNA, 382 bp, Glycine max
tagcttcaatggctcaatgagcaatgggaaatgatagtcaatcaacaaataaagatacccttttctataagaggctattgtgataaagatttatatgatatgatccctatggaagcagggcacattttgtttggtagaccatggaaatttgacaagaaagcaatccataatggtctcaccaatgaaataaccctcacctatggaagcaaaaagttcaaacttgttccctttacaccttcacaactggccagggatcaagtacaaataaaattcaaaagggatgagcaaaagaatagaaaaagataagaagaacaacctttaatggttaaggaggagtgtaaggaggtaagtgtctactctaagagattagctaagaaggaaa

SEQ ID NO: 17351 - DNA, 440 bp, Glycine max
  unsure at all n locations
ttgtggcaaacttcactgcagaattcataagcttggtatgtgctaaattccctgtcaaggtacctcaaatagtggacagaaaatttttcttcactgtggggctagggactaatccttgccccanaaacacaacatgccaagggccaagtaataacaccaaatttgcagcctcagtgaacaacatttcttttgcacttccatcatctgtttccatcatgcaggcatactattctagccaggccaatggggttttcaagactgattttcctgccacccctttgaaccctttcaactacacaggaacacctccaaacaacacaatggtcaccaatgacacanagctggtggtgctcaagtttaacaccagtgtggagttggtgctgcaggacactagtattcttggagctgagagccatcccttgcatcttcatggttatgac

SEQ ID NO: 17352 - DNA, 436 bp, Glycine max
  unsure at all n locations
gaaattaaagatattcaacatggatgatcaagattgtttctagagtcttaggaagggtatattacataggaagggaattcctatttgaagtatcaaaaggtttggccaagaaatttaagttaaaaagctttattcaagagatttactctctggtcatcaattaccagaggatgtaatcgattaccactggccaaagatgatttacaacagctattaaaatttgaattcaaaatttgcactgtgtaatcgattacacatatatggtaatcgattaccagcagtttctgaacattgtaattcaaatgttagagcttgtaatcgattacacacatactgtgatcgattaccagaggagtttttcagagaacattctcaacagtcacatcttgttatctatttcttaaatggccatcanaggcctatatatatgtgtgac

SEQ ID NO: 17353 - DNA, 393 bp, Glycine max
agcttgttcaggaattatttgtatgggttggatgttgaattctggttgttcctggtgtggagatgatggtacatgtttgtgaaccagaagcggaagtttcttttggtgaggaagccatggaaaaacagagcgtttggaatgatttcgtaaatctcagaaaactattgggaaatgctggtgaaaacacgaatgccacgaaaatataaatttgaatgaggaatgtagagggccgtgtgaagcaacggtcgaatttgccttggttcagtagtgaacgtgctattaatgttaagtgattcgtttgggcacgttcagatatcagtagttgctacaattcctctagcagacaaatgcccagcttgcccctcagtttttcaaactgatttgcatccaaag

SEQ ID NO: 17354 - DNA, 385 bp, Glycine max
tgctttgaacatgttgcaagcaaacttgaacagcatcatgtactctcacaaagtaccattctttgcctatcaactccaccagaccggatctagacaaggtaagcagaacttctggacttggattggatattgcaatctgcaagaagaataagctcaagttggttggtggagacattgcaaacctgtggcgattatttcaagaattctaacagtagttgaaactttggtatcttattctacctgaatgtcccgtaatttgtactcctgatacaagtctttcaaagcctgaacagcactagaatctatgtaggtcacagctgcagtcatcacaagtcataaccacatgattagaagaaagtagaattatcatcattatccctttcat

SEQ ID NO: 17355 - DNA, 387 bp, Glycine max
tgcttttaggttgactagttcattgacattcagcaattgaaggagatatacatctatttcaagaaaagaaaaatcataaaagacagtgtgcattaaaaaaaatcaccttcattggctgcatcaacttgaacaaccatgcatgttctgaagaaggaagaactggcggaatcttcattttcttccagtccatgctaactaaatcagttgatgctgaataatccctgataagcacatcaatattttgtactctattcttaacattccttttcttctgagtttgatcaatcacctcctcctttgcattatttttcaatgcaatcctcttatcaagactcaatcgtttggccttcttattctggtttctaaccacattatcacaatttccat

SEQ ID NO: 17356 - DNA, 448 bp, Glycine max
  unsure at all n locations
ntaattganattaagttatctaattatgtaagttcttgatttaatccctattttctctccccctttggcatcaacaaaaagccaaagtgcataacacatataaaacatacataaatgactaatcatacaagacatttattgaaaaatctaaaccgatcatgaagcaaaaaacatgaaatatccaaattaaaatataaaccacataatcatataacataatttatagatgttcagttatagtaagcaaatagtaaaagaaatactaaatgttcaaatgtcataatattacagatcatttggataagtcactagcatctagcagtcctaattctcttctaatgttgaagaaggaatctttatttagtgtctatgagaagatgtctgcaagttgatttttagtatctacaaattcataacaacatcacctgttagaatatgatctctaata

SEQ ID NO: 17357 - DNA, 391 bp, Glycine max
agctttcttaagaagattcctaaaaaagctagagcttagctacacatacctttctaatagctaagctcacctccttgagatgagaagctagatcttagctacacaccccctataatggctaagctcacccccatgacaaaaaacatgaaaatacaaaaaaaattccttactacaaagactactcaaaatgccccgaaatacaaggctaaaaccctatactactagaatgaccaaaatacaaggcccagacgaaggaaaaacctattctaatatttacaaagataagcgggctcatacttagcccatgggctcgaaatctaccctaaggctcatgagaaccctagggccttcccttggatctctagcccaatctacttggagtcttctaccc

SEQ ID NO: 17358 - DNA, 424 bp, Glycine max
tgttgaaggagaatagataaggagtttatgaagaggttgtggtcacggcagtgtttgggaaggaagaactccaagacaaaatcaaaatggggataagaagaagtccttagaggaatagcgacggcagaatgcaagtcaaagatgttggcgtggtgagagagaggatattcggccttggtgaaggcggttatgtccatagcaaaacagggcttggcagttgtgaaggccgtaccgacaattccttgtccgcggaaaaggtggtgctgagagcatgcctcctggaaccccaatagctggggctgaccatcccccacaaaacacgctctgtccacaatcgacacatagttgttctcatcccttgaatgcccacaatccacacatagttgttggacgcaaggagcccatgtcagatgccaaggcacat

SEQ ID NO: 17359 - DNA, 453 bp, Glycine max
  unsure at all n locations
tctttgagaaaacttccttgagatgttagagcttatctacacacacccctctcatgactaagctgacctccttgagaagctctcttaagaagattcctaaagaagctagagcttagctacacacacctttctaatagctaagctcacctccttgagatgagaagctagagcttagctacacaccccctataatagctaagctcacccctatgccaaaaaaacatgaaaaaaacaaaaaaagtcgttgctacaaagactactcaaaatgccccgaaatacaaggctaaaaccctatactactagaatggccaaaatacaaggcccaaacgaaggagaaacctattctaatatttacaaagataagcgggctcatacttggtccatgggcttgaaatctaccctaaagctcatgagatccctanggccttcccttggatctttgcgccaatctac

SEQ ID NO: 17360 - DNA, 380 bp, Glycine max
agcttaataaatcaatctatggcttgaagcaagcctcctgccaatggtatttgaagtttcatgatgtcgtcacttcatttggctttgaaaagaacatcatggatcaatgtatataccaaaaggtcagtgggagtaagatttttttcttgtgttatacgtggatgacattttgcttgcaactaatgataagggtttgctatatgaggtgaaataatttctctcaaagaactttgatatgaaggatatgggaaatgcattttatgtcattggcattaagatccatagggaaagatctcgaggaattttgggtttgtctcaagagacttatattaacaaatttttagagagaattaacatgaaagatgttcaccaagtgtagc

SEQ ID NO: 17361 - DNA, 396 bp, Glycine max
tgtctatgcaagcttataatatatcgatacgctcgaaattaaacattggaaactctcgggaaattcaaatagtcataacttttcacacggatgtccgattcgggcgcataatatgtcgagaggctcgaaattgaacaacgcaagctcttgagaaattagactggtataacttttcacacggaagctctcgtgaagtccatatggtcataacttttcacactgaggtccgattgatgtttataatatatcgatacactcgaaattaaacatcggaaactctgtagaaattcaaatggtcatagcgtttcacacggatgtgcgactcgggcgcatgatatgtcgagaggctcgaaattgacaaacggaagctctcgagaaattcaaatggccataact

SEQ ID NO: 17362 - DNA, 467 bp, Glycine max
tgaatcggacatccgtgtgaaaagttatgaccatttttatttctcaagagcttccgttgttcagtttcgatcctctcgacatattatgcacccgaatcggacatctgtgtgaaaagtcatgatcatttgaatttctcgagagtttgcgatgtttaatttcgagcgtatcgatatattataaccctgaatcggacctcagtctgaaaagttatgaccatttgaatttgacgagagcttccgttgttcaatttcgaatatcactgtatgtgatgcgcctaaattggacattcgagttaaatgttatgaccatttgaatttctcaagagcttccgctgttcaattctgagcgtctcgatatgtgatttgcctgaatcggacatccgtgtgaaaagtatgtccatttgaatctctcaagtgcttccgttgatcaatttcgagcgtctcgacatattatgcgcccgaatcgg

SEQ ID NO: 17363 - DNA, 380 bp, Glycine max
agctttcaaacccatgtaatctcctaatatctcccacactttgtgggttgggccattcttggatggccttgattttctcagggtccacttggaccccatttctaccaactacaaaacctaagaaaactatattatctacacaaaaggtacacttctctatatttgcatagaaggtgtttttcctaagaacagaaagaacttgtctgagatgtactaagtgatcatctaggctcctactatacactaaaatatcatcaaaataaacaactacaaatctacctatgaaatcccttaagacatgatgcataagcctcataaaggtgcttggtgcattagtgagccctaaaagcatcactatccattcatataaaccaaacttg

SEQ ID NO: 17364 - DNA, 396 bp, Glycine max
actccgctggatgcaacatgggagagggaatttatcacgagttgatgcgctccatgaaaggcaggatcggatggataatagagaacacactgaagataacaggaggagaagagggaatgatggtgttcctaaacaaaaccgaattgatggtattaaactcaacattcctccatttaaaggaaagaatgatccggaggcctacttggagtgggagatgaaaatagagcatgttttctcatgcaacaactatgatgaggaccagaatgtgaatcttgccgccacggatttttccgactatgctcttgtgtggtggaacaagctaccaaacgagagagcaagaaatgaagagccaatggttgatacatggacggagatgataaatatcatgacgaagcg

SEQ ID NO: 17365 - DNA, 402 bp, Glycine max
tgaaggtgcgtaccctcaccattttatatagaaatctctggtaatgtgtctactattattatgatcatctctttatccgtcattggaggtgccacttgagcttgctaggtctctccacctttgggcttattatttgaaagattcgtgcccctttttgtacatgttctgtagttgtatcctatccagagccatatcagaattgtactgatattgcctaacgatggcaaacattaggtctttccaagaatggattcaggaaggttccaagttagtttaccaggtaccccagtaagactttcttggaagaaatgtatcagcagttcctcatcttttgcgtatgcccccatcttccaacaatacacctttagatggttcttggggcaagtagtccccttgtacttg

SEQ ID NO: 17366 - DNA, 418 bp, Glycine max
agctcgaatcggacatccgtgtgaaaagttatgagcatttgtttttctcaagagcttccattgttcaatttcgagcatctcgatatattataagcctgaatcggacattcgtgtgaaaagttatgaccatttgaatttctcaagaggttccgttgttcaatttcgagcctctcgacatcttatacgcccgaatcgaacatccgtgtgaaaagttatgaccatttgaatttgcaagagtttccgatgtttaatttcgagcgtatcgatatattataagcctgaaacggacattcgtataaaaagttatgaccatttgaatttctcaagagcttccgctgttcatttcgagccttcgacatattatgcgcccgaatcggacatccgtgtgaaaagatatgaccatttgaatttcgcgaga

SEQ ID NO: 17367 - DNA, 383 bp, Glycine max
  unsure at all n locations
atcttcaacttcaattatgagttgagcaggtaaaaaagattcgtcttcaaactcttagaggtgactctgagtgtttgtttatggaggagtccgagtcaatttatgattatttttctcgagtattggccgtagtcaatcaacttaaaagaaatggtgaagatgttgatgaggtgaaggttatggaaaaaatacttcgaactttaaatccaagttttgacttcattgttaccaacattgaagaaaacaaggatttaaagaccatgactattgagcaactcatgggttccttacaagcacacgaagaanaacaaaagagaaaaattaaacaaaaggaggctacggagcaactactacaactcaacgtanaggaagcaaactatgcc

SEQ ID NO: 17368 - DNA, 427 bp, Glycine max
  unsure at all n locations
agctcncaacttacttccaatgaacaaccttcttgttacattatttgaaatctttgaaggtaatttaattgtcaattacaaaagtacataaaggtcctcaattttggtggttgctctctctttgatgattcactcaatttggagtgcttcttagttcaatagcttttaaggtggttggcccctcgcttcttgattgaaattcttcaatggatgacatcaatcctcctttccaattccctatatggaaactcacaaacaagaaaacaaagagacaaacaataaccaaagaccaaaaaattaaatgaaagctaaaccaataaatttttaacaagaaaaattttcaaggattattcgacaattaaagcaatgaaaaggacatagaagcaagctaggactcaaagagaaacttagaatgactctagagtag

SEQ ID NO: 17369 - DNA, 351 bp, Glycine max
  unsure at all n locations
agttcntgttgtcnncaagcaaatgttggaagagggtgtaacgcctagtgctccaacttttgtgagtgttatagatgcctgtgcacaggatgcgcttatacgaagaggtaaacaggtgcatggtcaaattattaaaggtgacaaaagtggtaacttgtttaatgtgtatgtgtgtaatgctttgattgacatgtatgctaagtgtggagatatgaaatcagctgaaaatttgttcgagatggctcctatgagggatgtggtaacttggaacacattgattactgggtttgcacaaaatggccatggagaggagtcactggctgttttcacaaagatgatagaagccaaagt

SEQ ID NO: 17370 - DNA, 414 bp, Glycine max
  unsure at all n locations
ctaagcttgtggaagccttgagcaacaaactgttgggtttttggcaagctttgaagacccagccatcgtaaaaaaaaaaggtatgatttatcattgttttgtttgcagtagtggccatgctctaacgagtgcgtaccaaagttatcttcagttgatctaacatgttttgtctgtggagcattgattcttcaagggaatgaatggtggtggacccttgaacgtagtcaagaagggaaggttgatctcgacaatacaaagcacgaaagggctaatgttgatggccgaatggtaggaagaattgtaccaatatttgacgaggtgaaggtacttgtaccaagatcatggatgttctccaacaaaacatctcaattaaacctcanaactgcgattagtgacttcagtttggttgtctaa

SEQ ID NO: 17371 - DNA, 235 bp, Glycine max
  unsure at all n locations
tggcnttgaaataaaaatntgtaggtgtngcaagggtttgtggttagtgcttatntgntgagaaanatatagaactttgntnttatatgcagcaacctgcagcaattgaccagcctgaagcttactgctgccatatttacaatagacctcctcaacctcagcagcaaaatcaaccacagcagaaccattgtgacctttcccgcgacagatacaaccctggatggacgaatcaccc

SEQ ID NO: 17372 - DNA, 410 bp, Glycine max
  unsure at all n locations
agcaattcttagagaatcggcatgatatgcgctctaaatacaatatccgngcnattttagacgcngcatgtaacttgatggctaaggtgccaatgacaagaaataaaatgattttgctcaacattcaaaatgatgtggcacaatatctcgagatgtgctacaaggatgcatctcggctttggcatattcaatttgggcatcttaattttggaggattatagtttctctccaagatagaaatagtgagaggattgtcttgcaatagtcaccttgatcaagtgtgtgaaggatgtctacttggcaagcaatttaagaaaaacatttcaaaggagtctaactcaagagctaaaaaattgttggaacttatgcatatagatgtgtgcagttctatccagccgtagtcacatgga

SEQ ID NO: 17373 - DNA, 383 bp, Glycine max
  unsure at all n locations
agtttctaatgngnncataatgattgcagaagcatacttagttctcccgaaatcctcctgcaaaaactgcagcataatgtcttgtgggtctgtggttctgaagaagcttggtaaatctcaacaaaatttctttgacgccaggtaaccaatcgatggcagtctccaaatagccatttgttatatcagtcgactctgcaagcataggcatgcaataaattgagtgcatttatgaattcatgttatatggaaaatcacgttgcaacatcagttagtataatatttatagatatcgtctttaatttcatgttaagaaattgattttgaatacacggtcaattttgagttcaacaaaaaaaaaacatcaaaaaataaattactttact

SEQ ID NO: 17374 - DNA, 378 bp, Glycine max
  unsure at all n locations
agcttgtgggatngagtttagtttcaaaatccgtgcctcctccaaagcgaacagggtggattggaagaggaaattgtcacatggaaaaggccaccatagatctgaagcgcgatggaaaggatctgaacggtcgcgttcatcaactcccctgctgcgtcaagcacgactgtcccgcctccgtttcccactatttcaaaccctaacacaaatgtgttggggaagacgagggtttaccgttacaagaggctcattttagaggcaggttactccaaggaacaacactccctcttccgcacggttactctggtacgctatgcctctctcaacacacgcatgtcagtgaatgttatctgctcctatgtatatgtgtgtgtatgc

SEQ ID NO: 17375 - DNA, 428 bp, Glycine max
  unsure at all n locations
catctaagcttcaacgatgaaacaaggctcacttacagtgactgagtttttcactcgtctacgtgtaatttgggatgagattgagaactttagacccgatcccatctgttcctgtaatatcaggtgttcctgcaacgcattcaccattatcgcgcaacggaagctcgaggatagagccatgcagttcctacgaggcctgaaggaacaatatgctaatattcgttctcatgttctcctcgtggatcccatacccgctatctccaaaatattctcctatgtagctcaacaggaaaggcaactactgggtaacaccgaaccaggtattaacttcgaacccaaagatatctccattaacgctgctaagaccgtntgcgatttctgtggacgcattggtcatgtggaaagcgcgtgttataagaagcatggag

SEQ ID NO: 17376 - DNA, 375 bp, Glycine max
agcttgcacttctcaaagaagtcaacaaggagatcagcagcacggtcaccatggtaagggtcaatgtggaagccagacttgccatgcacaatgatctcagcaggaccaccattgcatgtggcgaatgttggcaacccacaagtcatggcctcaaccactgtcaaaccaaaagcctcgtatatagccggctgcacgaaagctcccttggtgtcgcagatcacacggtacagctctccgttcctcacacggttcatctgagatgaaatccatctgaattgcccgttcaacttgtaggtctcgatcaggccgtacatcttcttcatctcggccttctcttccaagtccttcgactccttcctcctgtctccggcaaca

SEQ ID NO: 17377 - DNA, 346 bp, Glycine max
  unsure at all n locations
aactaacgctgctctaatccccgcaaaaagacgatcattccagctctaccagcgaattcttcaaatgcaagtaaccttttcccagtgtcccccacaattaattcatagtcatataacgatgccctctcagctagaatctaagattatggaaaataccaaaagcgagttagaagttgcaagaaaccaccacaaaatcgaagtcacatttcaagcatttaagtattatatatacaagtatgtaacattaacacaccttatccagcaaaggcatgttatctttctgtgctntatgtgtatgtgagaggaaagcataagctctatctggtaatatcatctacagctgcac

SEQ ID NO: 17378 - DNA, 375 bp, Glycine max
tctagtcttcttcacatagtccgcctttgcttgaccttctttatgcttaaaaacagaaacattaggcataggcaaaagatcaagaggagttagtgggttaaaaccataaacaacttcaaaaggagaacaattagtggtgctatgaacagctctattgtaagcaaattcaacatggggtaaacaagcttcccaagtttttaagttcttcctcaaaactgtcctaagcaaagttcccaaagtcctattaacaacttccgtttgcccatcggtttgtgggtgacaagtggttgaaaataacaatttagtgcccaacttgctccacaaagtcctccaaaaatggcttaagaacttagagtccctatcactaacaatgct

SEQ ID NO: 17379 - DNA, 365 bp, Glycine max
gtctcacgattgtcatgtgctcatgcaacaattgatatccttggctttacgagacatcctgccgatacaaagacaggttaaccatatctcgcctgcgctaattgttccatgctatatgtagcacactcattgatcctgtgaagtctgatgacctgtacaatgaggccgcagccatactgggccagttggacatgatattcacccctatgctttctttgacatcatgattaactcgatagagcatctgtgcagagaaaccaaacgatgagggcctgtttatctacagaggatgtacccggtagaacgatacatgaagagcgtaaaagggtacaccattaatctatatcgactacacacatccattg

SEQ ID NO: 17380 - DNA, 384 bp, Glycine max
agctttacacgtatcatttaagtgtatggaccatatcgtagccaaggtgctcatcgataatggttccagtttaaacgtgatgcctaagagcactttggagaaattaccattcaatgcctcccacctaaagccgagttcaatggtggttcgtgccttcgacggcacccgccgagaggttaggggacagatcgacctcccagtacagataggccctcacagatgccaagttaccttccaaataatggacattaaccccccctacagctgtctgttggggtgtccgtggatccactcagtgggagttgttccctctacacaccaccaaaagttgaaattcgtagtggaagggcatctggtcatcgtatcaggcgaggaagacatctt

SEQ ID NO: 17381 - DNA, 386 bp, Glycine max
  unsure at all n locations
agctttgtgaagctcctgttttatctttacccgattttactcaaccatttgaagttgaatgtgatgctagtggagttggcattggggctgttttgatacaaaacaaaaggcctatagcttatttctcggagaaattgggaggagccagattgaactattgcacctatgacaaagagttctatgccattgtgagagctcttgatcattggaatcattatttgcgttctaatcactttatattgcattcagatcatgagtcattgaagtatatcaatgggcagcagaagttgagtccaaggcatgctaaatgggttgaatttcttcaatcttttaatttctcttcanaatacaaggatggtaagagtaatgtggtggctgatgcactt

SEQ ID NO: 17382 - DNA, 419 bp, Glycine max
tcgaccaaaatcaaatgataataactttttactcggttgtccgaatgaataccgtattatatcgagaggttcgaaattgacaacggaggctctgagaaaatccaaacgacaataactttttactcggatgtcagattgtgtcccatagtatatcgagatgctcgtaattgaaaccggatgctcgtagcaaattcaaacgacaataactttttactcggatgtccgaatgaatcccataatatatcgagacgctcgtaattgaaaacagaagctctgagcatattctaatgacaataactttttactcggatgtcagattgagtcccgtaatatatcgagacactcgtaattgaaaacagaagctctgagaaatatctaacgacaattactttttactcggatgtctgaatgaatcccgt

SEQ ID NO: 17383 - DNA, 376 bp, Glycine max
agcttgttatcaaagtacatgaactatgctagtagaattcattttcaggcagcaaaaagagctcttagatatgttaaaggcacaattgattttggaataagataccattatgttaaaaacttcagacttcatggttattctgatagtgattgggctggatgtgctgatgatatgagaagtacttcaggttatctttttagctttggttctggaattttctcattgtattcaaagaaacaggaagtaatagctcaatccatagcagaagcagaatatgttgttgcaactgctgcttgtaatcaagctctctagatcagaaagcttatgacagaattgcatatggaacaacaagacaatacgcaaatatttgtcgata

SEQ ID NO: 17384 - DNA, 414 bp, Glycine max
  unsure at all n locations
tccgcttattagtgaacaattccttctttaatttagtatatcttggaattcgctntattgcatccagcagaggtatgtttacctctacttttctaaatgtttcaaagatctctttctatgcctcttccatttttttgttggaaattgctcttggagggaatggaagagggatatgctgcttctctttagattcacctggatagaaattgttaggtaacttactctttaaatttttgtcatcatctttttctggagtagagtgaggttgggcaggttcattggtggatgaggaagatgctactggttgaggtccttgacactgctttcctgacctcaatgtaatgacactcacattnttgggattctggacagattgagaacgtaatctatcagaattctgggactgttgttgat

SEQ ID NO: 17385 - DNA, 376 bp, Glycine max
ttctgctttatatggttacaaaccaatcaacaacaatcccttgatggcaggtgatacaacagttgaagcagtagactacaccatcaggactcgagaggaaattgcaacaattttacacaagaatctcaggaaagcacaggagaggatgcagttgtatgctaacaagaataggacaaacaaagaatttgcagtgggagattgggtatatttgaagttacatccatttaaacaacagtcaatacctaactcagcgtttcacaaattagttgcacgattttatggtccttacagaattgtagagagagtggggaaggtggcatacaagctagacttaccagctcaagctcgcatacataatgtattccacatttccttg

SEQ ID NO: 17386 - DNA, 424 bp, Glycine max
  unsure at all n locations
ntntgaaaagacacatttcttcaaaccattttgaaaaggcacaaaggacctatatatatgtgtgtttgacttcgaaaagcaagaaagagatattctaagagaacttcattgtcaaatgctctctcaacaactcttgggcaaacacttgcaaatctattgagagttcatctaggaacatcaaattgtattatccactctaaaggagagaaatctttttgttcatctcagaaaatcaattgtaatcaatagactggttgtctcttgaattgtgagtttcctgaacacaagggaaagggattccttaggtgttcagatgttgtaaaaaggtttttacaaagttagtgaaaatctcaagtgggttgcttgaggactggacgtangcacgggaagtaaccgaaccagtataaattgagtttgcatttct

SEQ ID NO: 17387 - DNA, 427 bp, Glycine max
agctctctaatccatataaaccataccatgctcttaacatgtaatattgtcttcagccatcatttggagagctagtgcaaatctttctctatttactaaatcatctatgtaacatctgtaacaatttacggacgtataatgctgccacttaacatgacatctgatgatgaaccaatttacgtaaatgctaagcagtaccatggaatcattagacgtcggcagtcccgtgccaaagctgtacttgatcacaaattgactaaacgtcgcaaggtatgattcctcatatgggggtatcccacatattttttcactcatattaatgaacattatagtctcagcttcactggccttgaaaaaaagtaggtatgatagggtggtctggcctaactcttgtagaaagtgatagattatctctttcaagcaacgc

SEQ ID NO: 17388 - DNA, 374 bp, Glycine max
agctattttattgataggcccaccagtaattgctgcaccagctagtaaataactggcacttgaagcatcaccttcaacaaaagcattgccaggagacctaataggaaacatgagtcttaatttcattgcattttggatactaaaagtgatgtaacactaaaacatagaaacctacttgtacttttgacctccatggaccaagaacctatcccaattaccactgtgttccacagaaactccaaaacgctccatcaacttcagagtcatttcaacatatggaacagaaatcagtttatcaacaatctcaatttccacatcaccaagagctaaaggagctgccataagcaaagcagtcaagtattgactgctaactg

SEQ ID NO: 17389 - DNA, 407 bp, Glycine max
gcccttctgatccgaagaggctgacttttgcggatttcgtcgagagcttatttgacctcatcaacgtgctccatcatctcttcgaactcctgcgcctccatcagcgtccacgtagtcggaatccccttcggcggcgctcgcttcgccctcttcgactcccttgctacgcctgcgccggagccgtatccgaagtcgccgatctccgaatcgaataatgaccaatgctgcgaggaccattcctgggatgagaacgctaatccgcagaaagggtcgtcaatctcctgagataacgaatccctgactggcttcgaaacgtcgtcgattatagaggacgatcccgattacgtacccgagaggggtcctttgctgctggcgtaggcgcggacgatcattttacatggagatcg

SEQ ID NO: 17390 - DNA, 406 bp, Glycine max
tgggtctagacatgtctatagcattctcatgagctagtttatataaggagttagaaattttgtttgtctctctataaatatgagaaccttgttggattaaaataaaattggaaaataaataaagaactttaacctatatactatgtgatcaatctataaaatgataatcataacatttcaattatataatcattaagaaataagggtggacatgggttaggttgctcgggtttaaaaaatatttagatttaaccaaattaatattaatcagaaaaaaattatatagaattaaacaaacaaattatatattatagaatcatacaacataaaaaagtatattttttctaaaatggtataggcttatgttggtttgggtctccgtacctagatctgataattgaattga

SEQ ID NO: 17391 - DNA, 379 bp, Glycine max
  unsure at all n locations
taagagcaatntctttttttnttttatcattnnctttgtgtngatnnaatctcaacagttccatttcgtattcctgtaactttccaaatagtgtagcaagagacatgttagttaaatctcgtgactcagtaatggttgttaccttaggttgccattctctacttaaacatcttaatactttatttatgatatcttcatttggaaaaattttccctaaagatgcaagatgatttattatatgtgtaaacctcttttgcatgtcttgtatactttcatttgaattcattctaaataattcatacttatgagttaatggatttatcctagatattttcacatctgttgtgccctcatgtgttacttgtagggtatcccacat

SEQ ID NO: 17392 - DNA, 426 bp, Glycine max
  unsure at all n locations
ctccaaaaagaattgcaagagtcatgttagcgagatctttcgattatgcaatngtagttacctttggttgtcattgcctgcttaaacatctcaacactttgttaatgaaatcttcattatgaaatattttttctaatgatgcaagatgattaactatatgtgtaaatctcttttggatatcttgtatggtctcattttgattcattctaaacagttcatatttatgtgtgagagtatttattctagatctcttgacatcaattatgccttcatgggttacttgtagtgtatcccacatttcttttgcatttttacaatttgaaactctaaaatattcatccatgcctaatgcagaggtaattatatttttgacctttanattatattgaacccttcttctttcatcttcatcccattgttctctag

SEQ ID NO: 17393 - DNA, 398 bp, Glycine max
atgagattctttcttggcattgtatttttgcagattccagaagggattttcttgtgtcaaagaaaatatgccactgatatcttgaagaagtttgcaatgtctgagagcaaacatgtgaaaagtccaattgttccaggttttaaaattaatagagatgttgatggtgcagctgtggatgacacttatttcaagcaaattgttggaagcttaatgtatcttacaactacaaggccagatataatgtatagtgtgagcttaattagcagatataggtcaaaaccaatagagttgcatttacaagctgctaaaagaatattaaggtatttaaacggaaccactagctacgggatattctacaagaagggaggggcagaagacttgtttgctttcacggattc

SEQ ID NO: 17394 - DNA, 424 bp, Glycine max
tgtcgggttcaacttcaattaagtgctcggggcatcctatggactgtgcgaaaaggctcaggtcatcaaatactacgcatcttttaaagcacaaagcgaggatcagaacctcaaccctacgttcttttaaaagactgcgatgggaaaattacagaggacaggaatccctgggggaaaccaagaagaacacacaaaaataaaaacatgcagcgacttccttaattgccccagatctcaagcatagtatcgcttgacaacgtcagagtttacgggtgaaggtagctccttgtcatccatgttggcgagcaccagggcccctccggagaaagccctttttacaacgaaaggcccttcgtagttcgggacccactttcctttgttgtctttcagagcttgggagactttcttcagcaccaagtcccct

SEQ ID NO: 17395 - DNA, 372 bp, Glycine max
  unsure at all n locations
agtttcttattctcagctgatgaagatgaattcgtggctacttcatgcactcctctaatgacaatagcatcatttctggcactaaattgctgggagttggaagccatcttctcaattaaatttttggctttagcaggggtcatgtctccaagggctccaccactggcagcatctatcatacttctctccatgttactgagtccttcataaaaatattggaggagaagctgctcagaaatctggtggtgaaggcaactggcacatagtttttaaatctctcccaatattcatattggctctctccactgagttgcctaatgcctganatatcatttctaatggccgtggtcctggaagcagggaaaatttttt

SEQ ID NO: 17396 - DNA, 376 bp, Glycine max
agctttcctgttggatcaagtggcctcagaataattaagaagggggggttgaattaattattaacgtgtcttgactaattaaaaatctatcattcttaatgttactagattcaattaggcttttactactaagtcaagaaagtaaagaacagaaatagaaacttaaccaaaagtaaaagcgataattaaaagtacgcagtggaaattaaagagtgtagggaagaagaagacaaacacaagatttatactagtttgaccacaaaccgtgcctacatccagtccccaagcaacctgcggttcttgagatttctttcaaccttgtaaaatcctttacaagccaaagatccacatgggatgtaccctcccttgttgatgc

SEQ ID NO: 17397 - DNA, 426 bp, Glycine max
  unsure at all n locations
gcgaactatgaaactcaagctgagtctgcatgcatcttatngattgttaatgtattcctgttngttatttctacttaattctgcttaacaaaattaagtgtttgttagcatgacgaatagtagatcgagtcaaaagtcatacactaacatcatctaattacacatgtaattagttattgttgttgaagtcacttcttttatataaagtgtctgtgtctatatttttattacacaaacttcagtatttagtttttttaattttaaatgttatttgaatttctttacttttacttaatctcctattaaactccattatttttaaaattatttaaatatctaaacaaaaattagcctaaaacactaaattcttctcccagaattatcatccaaataaaactctcattattttaaaaaaaaatacccact

SEQ ID NO: 17398 - DNA, 371 bp, Glycine max
agcttcttggaagaatcctttcccactttttccttccccttggcctttgaagacaaggccttaccatccttctttttcttttggttttctagtttttcttcctcatccctcttatctttcatagttatttgatctttggctacctgtgaaggtgtttaaagatgcaaaacaaactctgttccaagatgggtgagggttatctcattagttaggccattatagattattttcctatgatattgccatggcctacctaagagaaggtgtcctgcctccataagaactacatcacaaatcacttcatccttatatgttccaatggagaacggcactttcactctgtgattgactatcatctccccttgctcatt

SEQ ID NO: 17399 - DNA, 382 bp, Glycine max
  unsure at all n locations
acctagcaagactcacgctggaatcatctacccgatttctgacggttattgggcgattccagaccaaatggctcctaagatgataggactgacagagaccaagaatgaagaggatgaactgatgcccacaacagagcagaacaattggcgagtatgcattgggcataggaggctgaattcagcaaccacaatagatcattttcccttgccttccatggatcaaaggctngaccgcttggcaggtcaatctcattactgctttctcgatggattttatggctgttggcaaattcatattgctcttgacgatctnagaaagaccacattcacctgtcccttaggcactattgcctatatgaggatgccctacaacctatgcaat

SEQ ID NO: 17400 - DNA, 337 bp, Glycine max
  unsure at all n locations
agcttgtagattctaagcaccttgtgagcatgggaacttatacggcttgactggctcaaagccaatgatcatactaccaacgacactatggatacatcgcatcaaatggcttcccataggtcttgcagtggataatgacagggtttacaagcataacctttgctaatcctatagccttctgcaatgcataatcacttggtgcactgaatacatgttctatgtcagtgccaataccaagggcagggtggtcaccaacactggggactgcatggctcaccatggtcagcatttctggagcgttttactgtatgcaagtgancttgcatgttctctcatc

SEQ ID NO: 17401 - DNA, 409 bp, Glycine max
agcttatgctgcttatatttacaatagacctcctcaaactcagcagcaaaatcaaccacaacagagcaattatgtcctctccagcaacagatacaaccctggatggaggaatcaccctaacctcagatggtccagccctaagcaacaacaacagcagcctgctccttccttccaaaatgctgttggcccaagcagaccatacattcctccaccaatccaacaacagcaacaaccccagaaacagccaacagttgaggcccctccacaaccttccctcgaagaacttgtgaggcaaatgactatgcagaacatgcagtttcagcaagagaccagagcctccattcagagcttaaccaatcagatgggacaattggctacccaattgaatcaacaacagtcccagaattct

SEQ ID NO: 17402 - DNA, 357 bp, Glycine max
agctttatgcatcattcggagaggctaacgagacaacgagatgatgcgctccatgagatgttgcatcaaatggagaatagagatcataatgaacaggaaaggaagagaaaagggaatgatggtgttcctagacaaaaccgaattgatggtattaaactcaacattcctccatttaaaggaaagaatgatccggaggcctacttggagtgggagatgaaaatagagcatgttctctcatgcaacaactatgaggaggaccaaaaggtgaagcttgccgccacggaagtttccgactatgctcttgtgtggtggaacaagctacaaaaggagagagcaagaaacgaagagccatggttg

SEQ ID NO: 17403 - DNA, 423 bp, Glycine max
  unsure at all n locations
tcaagaatcaagatcaagattcaagactcaagattcatttatttttatattatttaatcaagataagtatgaaaaagttttttcaaaaactgagtagcacatggatttttctcaaaacctttttaccaaagagtttttactctctggtaatcgattaccagactattgtaatcgataaccagtagcaaaatggatttgaaaaagtttttcaactaaatttacaacgttccaattgatttcaaaaagctgtaatcgattacaatgttttggtaatcgattaccagtgcctttgaaagttgaaattcaaattcaaatgtgaagagtcacatcctttcacataaaatntttgtgtaatcgattacactgatttggtaatcgattacttgtgattgtttatgattaaatcaaaagatgtaactcttc

SEQ ID NO: 17404 - DNA, 431 bp, Glycine max
taaaggagaaagaagatagaggaaactaaaattagtagtgattgttaattatcttacaagagagttggttattatagttttatataattggttgcaagaataactaacttgtaactaactaaactatctcttgtaacaaagtgatcaatctgaattaaccatgatcaaactatatctatgttaagatcccccttcaagctaggaatggatattggatattcctaacttggaatacaaaaattgaaaagaatcaggcagcatggccttagtgtatatgtctgcaagctcattagcaaaggtgataggaagtaatttcacaattcttttatgcatcttctcccgaactagatgacaatcaatcttaatatgttgtgttctctcatgaaaaacatgatatgttgctatatgaagggcagatcgattatcacaat

SEQ ID NO: 17405 - DNA, 317 bp, Glycine max
agcttgaaacacgctctttaaaggataaaagaggacaaattagaggcaaaagcggggccagaaattctcaccaattcaataaagagctcatcatttactttcttgtatgacagaggctgcatggatgcaaaatacttgatgcacacctgtcttgcttcaggcttttgagcctgcaaggccttccttgtctcttacagcaccttctgatacacttccagtgtcatctcctacaacacaggttaaatgccgtttagcaatgagtgaacaataacgaagaaaatataaaggtcaaacgtaacacactaaaagcatgatgg

SEQ ID NO: 17406 - DNA, 381 bp, Glycine max
agctttgaatggaggctctggtctcttgttgaaactgcatgttttgcatagtcatttgcctcacaagttcttcaagggaaggttgcggagaagcctcaactatttgttgtttctggggttgttgctgttgttgttgttgctgttgctgttgtgaatgatttgaccatctaaggttgggatgattcctccacccgggattgtacctatttctagagaggtcatagttgttcttttgtggctgattttgctgctgaggttgagggggtctattgtagatgtttgcagcataagcttcaagctgttcaattgcttcatattgttgacaaaaaggcaaaagtctgtgtggtggtcggcaaacgatcatataccatatagtctacc

SEQ ID NO: 17407 - DNA, 404 bp, Glycine max
  unsure at all n locations
agcttccatcatttcaccaacagacatgaaaacccattcaaaaaaaatgatgaaggcaagtgaattctcattattagtttcaaggttagcacaataataaatcttctctatttcacattaattgtgtgtgagcatctttattatctttatcatttttttttctctgtgaattcttaattttcaaactaaatctaacatatgccaatgtatagtttaatatataaaaggagaaactattgtaaaatataaaattcaactcttacacataaaaacaaaaaatgtgtagagatagacatatattcagaaaaaataattaataaaccanaaataacatangaaaaaaacttacaaaacatgattntgtgtaggtaaaaccaataaaataaaacttttactacctatgg

SEQ ID NO: 17408 - DNA, 434 bp, Glycine max
  unsure at all n locations
tatgtccaaacggctaaggtttgtcaatgtaaaaatgcttgatgtgttcattcctccagtgtangaatttgagtgcagcacaagaaacttcagttgcttgaatttcccaaaaatctcctgcacctccccaccaaatttattcctgcttaaatccaagatgaacaaatgggtcaagttcaaaagggtctctgggatatccctcgagaaagtgttgttccccaagaacaatgcatcaagaccagaaatggaaccaatttcactgggaatatctccagtaaaattgttaccagaaaggttgagaaccaacaaattcttgcagttagcaacctcctttgggggcttaccgtcaaattcattaacagaaaggtcaagtttttcaaggctacaattgattggaaaagccttggaaggaacaacccctgtgagaaaattct

SEQ ID NO: 17409 - DNA, 422 bp, Glycine max
  unsure at all n locations
tacgcttgtgtaacttctccttaagtaccattttgaatgcgttttgacatccatttgttgtagtggccaaattgtgaggcgcaagagcaagaatatgccacagttgtcatcttggcgaccgggcaaaagtctcatcattagccaattcatattggtgcttatttccaagcacaactaaacgagctttgtaacgatctatggatccatccgagcgcagctttatagagaacacaaacttgctacttaaaggcttaacagatgtgggacacgggactatatcccatgtttgattttcttccaatgctagaagttcagtttcaatagctntctgccaacaagcattcttcatggcctggctataagaggaagggataggaataaaggataatgaggctgtcatggaatggatatacctgtctggg

SEQ ID NO: 17410 - DNA, 394 bp, Glycine max
  unsure at all n locations
agcttggctgcacacaactctctaatagctaagctcacctccttgagatgaaaagcaagagcttagctacacacatcccctataatagttaagctcacccccatgccaaaatacatgaaaatataaagaagtccctaatacaaagactacttaaaatgccctgaaatagaaggctaaaaccctatactactagaatggccaaaatacaaggcccaaaagtaggaaaaacctattctaatatttacaaagaagagtggacccaaccttggcccatgggatcaaaaatctaccctgaggttcatgagaatcttanggccttctttagcagctctagcccaatccttttggagtcttctatctaatacccttggggggtaggattgcatcanagtcg

SEQ ID NO: 17411 - DNA, 387 bp, Glycine max
agcttctaaactttgtacaagaatgaagctctgataccacttgttatacaagtggcctcagatatcttaagaagggggggttgaattaagatattccaaactgtttcccctaattaaaaatctatttcacttttttactcaagttatgaattcccttaatgacaatcttcttaaatattaattcaaacaaagcaacttgaatatgaatataaagcaataataaataaaggagattaagggaagagaaaatgcaaactcagttttatactggttcgaccacacccttgtgcctacgtccagtccccaagcaacccgcttgagagttccactatcttgtaaattccttttacaagatctaaacacacaaggacaatccttcctttgtgt

SEQ ID NO: 17412 - DNA, 394 bp, Glycine max
agcttatagaatatataataaaagaacaatgacaattgaagagtctatacatgtttcctttgatgattctaatgccattcttccaaggaaggattttttagatgatatttcagattccttagaagatacacatattcatggaaatgactctaaagaaaaagatgaaggaagcaatgaagattctcaagataatggagttagggcaaataatgaacttccaagagaatggaaagcctcaagagatcatcccctcgacaacattattggtgatatatcaaaaggggtaacaactagacattctcttaaagatttatgcaataatatggcttttgtatctatgattgaacctaaaaatataaaagaagccatactagatgataactggatcattgtc

SEQ ID NO: 17413 - DNA, 386 bp, Glycine max
  unsure at all n locations
agcttttgcaagctggaattatttatcctatctccgatagccaatgggtgagtcccgtccaggtagtcccgaagaagaccggcctcacagtgataaaaaatgagaaggaggagctgattcctactcgggtgcagaacagttggagagtctgcattgactataggaggctgaaccaagttaccaaaaaggaccattttcccctaccattcattgaccagatgcttgagcgcctgacaggtaaatatcagtactgtttccttgatggtttttctggttatatgcaaattactattgctcctgaggatcagganaagaccacattcacctgcccctttggcacttttgcctatangaggatgcctttcggcctgtgcaatgccccttgt

SEQ ID NO: 17414 - DNA, 402 bp, Glycine max
ttccacattgaattcagcacctaatgtcatattagattgtaattgggtatcttaacatatgagatttcagatggactttaatcctaatcccatagccgaccttttcacgagatctctacttaaccctttggttaaatgatcggccaaattatgctgagttctcacaaactccactgatatcacaccatgcatgattaactcccgaaccatgttgtgtctaacacccaagtgtctagacttcccattatacacttgactatatgccttagccaaagttgcctgactatcacacctgatagacatgggaggtataggtttgggccacaatgaaatctcatagatcagatttcttagccactcagcttctttaccagctgctgctaaagctacaaattcatattc

SEQ ID NO: 17415 - DNA, 413 bp, Glycine max
agctggggctattccaagttcatttaccatacctttaagctttattgctctcttactccttcacctagggccatgtattctgcttcagttgttgaaacactaacaactgattgttgatttgctttccaactgattgttgtaccaaacaaagtaaacacatatcctgttaaggatttccttgtgtctacatttcctgcaaaatctgcatctacatatcctgtgattgctgcctcatgtgctgtcttcttgtaccttaatccagctatcaaagatccatatagataccttagtgttcacttcacaacttcccaatgcgcactgccagcatctcccatgagtctgcttattatacttacaacatgagccacgtcaggtctgctgcaaaccattccatacattatgctttacacacc

SEQ ID NO: 17416 - DNA, 366 bp, Glycine max
  unsure at all n locations
agcgtggaaaactctgctctngtttccngctggagcccatagatagacttcttcagtttataaacgagatgagaattggcagaagcgaaaccttctggttgctgcatatagacttcctcttgaatggtcccatttagaaaagcattgatgatgtccacttgtcgggtatcccattttctggtgactgtaatgctcatgattgtgcgaatagtggctggtttaataacaggactgaatgtctcattgtaatcaaggcctggtctttgagataacctttaagccactagtcgagctgtgtgtctgacttcagagccatcagcattgtatttcaagcaatagatccatttggagccaatagccttctta

SEQ ID NO: 17417 - DNA, 430 bp, Glycine max
taacaccatcatgagcagcatgtctgtacaaatttaagatgttcaagatctaatactgtataaacaatcatcatactttactagttacattttctcacataccgcaaggaagtatccattctcagagaaagatatggcagttactggcccagcatgtccgtcaaacctagcaacatttgcctacaaccaatggaggaaggtaagaacatagagaataacattgaatattaaaattgaactttaaacaagtataagaaaaaatgtttacctgactttttacatcccaaatcttgacaagagattctgtggtgccggttccaagaatgagaccatccggatgaaaagccgcagatgtgtacccttccgaagaacctgaagtgtcataaacctacacaactcatcattaattgtctgattcagaacttatgta

SEQ ID NO: 17418 - DNA, 399 bp, Glycine max
  unsure at all n locations
agcttgctgccacggagttttccgactatgctcttgtgtggtggaacaagctacaaaaggagagagcaagaaatgaagagccaatggttgatacatggacggagatgaaaaagatcatgaggaagcggtatgtgccggctagttactcaagggacttgaaattcaagctccaaaaactaacccaaggcaacaagggggttgaggagtatttcaaggaaatggatgtgctcatgattcaagcaaatattgaagaagatgaggaggtaactatggctcgatttcttaatggtttgactaatgatatccatgatattgttgagctgcaggagtttgttgaaatggatgaattgcttcacanagcaatccaagtagagcaacaattaaaaaggaaaggagtgg

SEQ ID NO: 17419 - DNA, 389 bp, Glycine max
  unsure at all n locations
agctttctccactatgttgcctgatgcctgaaatgtcttttctgatggcagtggtcctagatgcagggaagaatttctccatgaacaccctcttaaggtcattccagctgaaaatggacctaggagcaaggtagtatagccaatcttttgtcactccctctagagaatgaggaaaatcctttagaaagatatgatcttcctggacattagggggcttcatggtggaacaaaaaatatggaactccttaagatgcttataaggatcttcacctgcaagaccacgaaacttgngcagcaaatgtattagtccagtcttgagaacatatggaacaccctcatcaggatattgaatgcacaagctntcataagtgaaatcaagtgcatccatc

SEQ ID NO: 17420 - DNA, 402 bp, Glycine max
  unsure at all n locations
agcttatcacgattcaaagctgttgaagagagacttcaaaccaggacaacatgtattactttttaattcaagattgaaattatttcctggtaagttgaaatccaaatggtctgaacctttcatcatcaggaaagttcggccttatggtgcaatagagttgtatgatccacaatttcaggaccttgactgaacatggttggtgaatggccaaagattgaaactgtaccatggtggagagtttgaaaaggcaaacaccatcttaaatttgatataacccattgaggtatatgcgtcaggctaatgacgttaaaagagcgcttcctgngaggcaacccaactctgatttctttcattntgtttttcatgcattgcataagttggaatttgctntatgatcatcga

SEQ ID NO: 17421 - DNA, 408 bp, Glycine max
ttgagcaaattcaagcaaattatcactttttactcggttgtctgtttgagtcccgtaatatatcgagacgctcgaaatggaacaccgaatctctgagaaaattcaaacgacaataactttttactcggatgtcagattgagtccagaaatatgtcaagatgcttgaaattgaagaccaaagctctgagcgaattcaaacgacaataactttttactcggatgtgtgactgagtcccgtaatatatcgagacgctcggaattgattatcgaagctctgagcaaattcaaacgacaataagttattactcggatgtctgattgagtcccgtagtatatcgagacgctagaaattgaataccgaagctctgagcaaatgtcaacgataataactttttactcagatgtctg

SEQ ID NO: 17422 - DNA, 427 bp, Glycine max
  unsure at all n locations
tgccgccacggagttttccgactatgctcttgtgtggttgaacatgctacaaaaggagagagcaagaaatgaagagccaatggttgatacatggacggagatgaaaaagatcatgaggaagcggtatgtgccggctagttactcaagggacttgaaattcaagctccaaaaactaacccaaggcaacaagggggttgaggagtatttcaaggaaatggatgtgctcatgattcaagcaaatattgaagaagatgaggaggtaactatggctcgatttcttaatggtttgactaatgatatctgtgatagctgcangaagttgttgaaatggatgatttgcttcacaaagcaatccaagtggagcaacaattaaaaaggaagggagtggctaagaggaagtttaccaactttggttcttctagttgga

SEQ ID NO: 17423 - DNA, 377 bp, Glycine max
  unsure at all n locations
tgtaggttatagtgacaatgattgngctagatatgaatatgatttataaattactagtggatttatgttttcaaggggaatacaaccttcacttggatgtcaaaaaagcatttgatagtcactttttcgacctgtgaggtgaaatacatagcagctacttcatgtgtttgtcatgcagtttggcttaagaatttgttaaaagagttaggcatgtcacaagaagagccaaccaagatctttgcggacaataggtcaggcattgctctagcaaagaatccagtgttccatgatcgaagcaaacatattgatacctgttaccactacataagggagtgcatagcaagaaaggatgtacatgtagaatatgtgaagtctca

SEQ ID NO: 17424 - DNA, 361 bp, Glycine max
tttcatgcaagcttggacactttcaatatgattgtcctacgtgggaaaagaaaccaaattatgctgagatggaggataaagaggaacaagaggatgagctcttgttaataaccttcatagattgcatagaagggaagaaggatgagtggtttctagactcgggatgcggcaaccacatgagtagtaacaaggagtggttctcagaattggatgagaactttcggcacaatgtaaggctgggtaatgatactcacatagctgtgaaggggaaaggtagtgtttggatggttgtgaatgagattatacatgtaatcacacatgtatattatgttcttgaactcaagaataatttattgagtat

SEQ ID NO: 17425 - DNA, 375 bp, Glycine max
  unsure at all n locations
agcttgtagggttaaagtctcactattgtcacgtgctcatgcaacaattgttagccgtggctatacgagacatcttgccaaacaaagtcaggttagccataactcgcctgtgctttttcttccatgctatatgtagcaaagtcattgatcctatcaagtttgatgagctggaaaatgaggctgcaattatactgtgccagttggagatgtattttccccctgttttctttgacatcatgattcacttgattgtgcatctggtcaaagaaatcaaatattgtggtcctgtttatctacggtggatgtacccggttgagcaatacatgaagatcttanaagggtatacaaagaatttatatcgtccagaagcatcta

SEQ ID NO: 17426 - DNA, 430 bp, Glycine max
  unsure at all n locations
tgatattaaatntaagtaaattacttgcaattcaaaatgttaaattaaatttaattgctattatgtatcacgcagtttatatgtaatttactttttacttaatgattgcaaaataatgcaagttatatttaatttaatgtttagttaatattttgtaagagttttgtttagctgatatatacatggaactagattgcattaaagttagattttttaacagaaaaggttatttaagtattttgattttagaataaaataaaaggaaatgtaattggcccttgtgcttatttaatgtcaaaattcctaatattttttagaggcatttggggaagctttccttgaacacaaggactgttctagggactcaaaagtgaccaagtttttggtttggttgtggctggaggcttctttgttctgttctttgtgagac

SEQ ID NO: 17427 - DNA, 403 bp, Glycine max
agcttaaacattttatttcgagcgtctcgttatattacgggactcaatcagacatccgagtaaaaagttattgtcgtatgaattggcttaaagcttaaacattcaatttcgagcgtctcgatatattacgggactcaatcagacatccgagtaaaaagttattgtcgtttgaattggctcagaggttcaaaattcaatttcgaacgtctcgatatattacgggactcaatcagacatccgagtaaaaagttattgtcttttgagttggctcagaggttcaacattcaatttcgagcgtcccgatatattacgtgactgaatcggacatccgagtaaaaagttattgtcgttcgaattgggtctgaggttcaacattcaatttcgagcgtctcgatatattacg

SEQ ID NO: 17428 - DNA, 414 bp, Glycine max
  unsure at all n locations
tacgacaataactntttactcggatgtctgattgagttccgnnaaanatcgagacgctcaaagttgaatgtttaatctttaagccaattcatacgacaataactttttactcggatgtctgattgagtcccgtaatataacgaaacgctcgaaattgaatgtttaagctttgagccaattctaacgataataactttttactcggatgtccgattgagtctcgtaatatatcgacacgctcgaaattgaatgttgaagctctaagcctattcaaacaacaataacgttttactcggatgtccgattcagtgacgtaatatatcgagacgctcgaaattgaatgttgaacctctgagccaactcaaacgaacaataacttntactcggatgtctgattgagtcccgtattatatc

SEQ ID NO: 17429 - DNA, 403 bp, Glycine max
agcttcttcacatttccgcctttgcttgaccttctttatgcttaaaaacagaaacattatgcataggcaaaagatcaagaggagttagtgggttaaaaccataaacaacttcaaaaggagaacaattagtggtgctatgaacagctctattgtaagcaaattcaacatggggtaaacaagcttcccaagtttttaagttcttcctcaaaactgtcctaagcaaagttcccaaagtcctattaacaacttccgtttgcccatcggtttgtgggtgacaagtggttgaaaataacaatttagtgcccaacttgctccacaaagtcctccaaaaatggcttaagaacttagagtccctatcactaacaatgctccttggcaaaccatggagtctcacaatctcctt

SEQ ID NO: 17430 - DNA, 423 bp, Glycine max
  unsure at all n locations
cacatgagtttgacaaaccttttaccatatagtttttactctctggtaatcgattaccagattattgtaatcgattaccagtagcaaaattgttttgaaaaagttttcaaattgaatttacaacgttccaattattttcaaaaagctgtaatcgattacaatgtttgggtaatcgattaccagtgcctttgaactttgaaattcaaattcaaatgtgaagagtcacattctttcacacaaaagctttgtgtaatcgattacactaatttggtaatcgattaccagtgactgtttctgataaatcaaaagatgtaactcttcacaagggttttgactttntcaaattgngtttaagttgttctaaaagttataactcttctaaatggtcttcttgactagacatgaagagtctataaaagcaag

SEQ ID NO: 17431 - DNA, 354 bp, Glycine max
  unsure at all n locations
agcttagttagtagggggcctgatgaccttgctaagagcaatgggcactctgtagaactgaccgcattcacctgtccctttggcacttttgtctataggaggatgccctttggcctatgcaacgcccctggtaccttccagcggtgtatgcttagcattttcagtgattntttagagagttgcatagaggtttttatggatgattttactatttatggatcctcttttgatgcatgtttggatagtctagatagagttctcaatagatgcattgaaactaaccttgtgctaaattttgaaaaatgtcactttatggtaaaacaaggtatagtcttagggcatatcatttctagt

SEQ ID NO: 17432 - DNA, 407 bp, Glycine max
  unsure at all n locations
tctggtgggacatcttgacttgctgtccaatctgacattctcctcttattctgccttcttctattttcagattgngaatgcctctaacagcacctttgtcaatgattttcttcatgcctcttaagtgcagatgtccaaatctttgatgccatattttgacttcatcttctttggagaatagacatgtggaggagtaactggtttcttgaggtgtccataggtagcagttgtcctttgatctgctgcccttcattagaacttcactcttctcatttgtcactaagcattctgactttgtgaagtttacattgaatccttcatcacacagctgactgatgctgattcaagttgtagtcagtcccttcaccagcagtactttgtccagactatgaagtccatcatggact

SEQ ID NO: 17433 - DNA, 413 bp, Glycine max
tgccttgtcccttgatatatttgatggactcatggtttctatgaatgacaaattccttgggataaaggtagtgttgccatgttttcaaagcccacactaaggcaaacaactctttatcataagttgaatagttaagggtaggaccacttaacttttcactaaaataagcaattggatggccttcttgcaacaacacaaccccaatcccaacgtttgaagcatcacactcaatttcaaaagatttttgaaagtttggcaacgcaagtatgggggcattagttagcttttgcttaagaacattgaaagcttcttcttgtttctctccccatttgaaaccaacatttttcttgagcacttcatttagaggtgctgccaatgtgctaaaatccttcacaaatcgtctataaaaactt

SEQ ID NO: 17434 - DNA, 402 bp, Glycine max
ctcagcttaccatcgatgggacaatggtaccctttgactctcaacagacccagaattctgacaagctgccttctcaagctgtccaaaatcccaaaaatgtcagtgccatttcattgaggtcgggaaaacagtgtcaaggacctcaacccgtagcaccttcctcatctgcaaatgaacctgccaaacttcactctactccagaaaaaggtgatgacaaaaatttacctaacaatttctgtgcaggtgaatcttcttccacaggtaattctgatttgcagaagcagcacattccccctcttccattccctccaagagcagtttccaacaaaaaaatggaagaggcagagaaagagatcttggatacattcggaaaagtagaggtaaacatacctctgctggatg

SEQ ID NO: 17435 - DNA, 360 bp, Glycine max
tcctgcttcatgcaatctttaacaacggtggcacgcctccttcgatgatgagtttcccgtaacggtcgttgtcgcgagcaagggagacgagggaagcggctgcgtctgaacgttcgtccaaggaagcaccggagagaagaatggcgacctgttcccagatgatgcagagaatgggctcgttggcggcgatgggagggaggcccaggtactcgtcgtagcgctcgtcggcggaggcacgtgggacgctcgtagaggtcgttgctgttcctggcggcctggcggatgaggcccgccaacttcttcagtttggatttcagctccagacattcctgtcggaaattctggtcctcttccgcaagc

SEQ ID NO: 17436 - DNA, 374 bp, Glycine max
agctttgtatgctctattcaatggagttgacaagaatatcttcagactgatcaacgcatgcacagtggccaaggatgcatgggagatcctgaaaaccactcatgaaggaacctccaaagtgaagatgtccagattgcaactattggccacaaaattcgaaaatctgaagatgaaggaggaagaatgtattcatgacttccacatgaacattcttgaaattgccaatgcttgcactgccttgggagagaggatgacagatgaaaagctggtgagaaagatcctcagatccttgcctaagagatttgacatgaaagtcactgcaatagaggaggcccaagacatttgcaacatgagagtagatgaactcattggtt

SEQ ID NO: 17437 - DNA, 441 bp, Glycine max
tagaaccctagcttatgctacaaacatttataatacaccccctcagtagcttaaccaacaatagcagaataattatgatctttcaagcaacagatacaatccaggttggaggaatcatccaaatctgagataggcaagtcctccacaacaacaatagcatgtccctcctttccagaatgttgttggtccaagcaagccatatgttcctcctctaatacagcagcaacaacaacaattgtcacaacaaagacaatcggcaactgaggctcctcctcaaccttccttataagagatagtgagacaaatgaccatccagaatatgcaatttcagcaagagacaagagcctccattcaaagtctaacaaatcatatggggcagatggctactcagttgaaccaaactcaatcccaaaattatgacaaattgccttcacaaactgt

SEQ ID NO: 17438 - DNA, 282 bp, Glycine max
tgcttctgtacagactgtgatcaacacttgtgcccgctttatccttcgacagctttaagtgagtaggtgcacgtgttcttctatgactggcaatttccattccgaacttatttacgatggtctttgcattcttgctttgggagaagaacatgaaagctttccttttgttttgcttgggagccgaaaaaataagtctcttttccaacgagactcatttgaaattcatattgcatctgtggtacaaaatgtcaaaccatttctttcgacatccctccaaacaca

SEQ ID NO: 17439 - DNA, 423 bp, Glycine max
  unsure at all n locations
agaggtgtgttgaaaccttctttatatctttatagttatttgtgtgataatgattttgtttatatgtggagactaatatagttttttttttctttggttaaggaatgggttttagcttccagaattgcagtgcctgacaacctgggtcttcgaatgcgtgggaggaccatggtccggccagctccaccatccaacaaacgagaactatcgtgggtcggcgatgttggttttgttgttgatgcttggtggcatgatggatggtgggaaggcattgttgttcaaaaggactcggaatctaattgtcatgtttatttcccaggtatgaatgtctgctctttctatgttaattagcttatgttggtaactgttcttttggtacttagattatgagctcgnttttttatttttgattaattcctatgg

SEQ ID NO: 17440 - DNA, 321 bp, Glycine max
tgtaggatattcaaacgacaataactttgtactcctatgtccgattgaatcgggtaatatatggagacgctaaaaatagagactagatgctctgagcaaattgaaatgacaataactttatacacggatatccggttgagtaccgtaatatatcgagacgctccaatttgaaaactgaaactcttagaaaattcagacgacaataactattactcggatgccctatagagtgtcattatatatcgagggatgcttcaaattgaaaacggaagctcgtatgaaatccaaacgacgataaccttttactaggatgtctgattg

SEQ ID NO: 17441 - DNA, 374 bp, Glycine max
agcttctttttctttggccaatgctggacttgcttggcagtgatttccttggcaatttgatgctcagaaatagcaatatccaccactccttcagttggtctgcccaggtacttgttgattacagcaggggagaatctaatacattttcctctgacaaacactttctgatactcatcactctttctgtttgctatgtcagagggaatgttgacaatgaattccctgactagactttcataacaatcacccatcttggtgacagttttcagcagtccagcagccttgatgaggtccatgatctccttgcaatccaaggcatctgtgtccagttctctttctaaggcaagtctgcgttgatatacaaatctccacct

SEQ ID NO: 17442 - DNA, 371 bp, Glycine max
tgtttttaacattgtttcacttacaagtgatcatggaggtgaatttcaaaatgagtcttttgaaaagttttgtgaagaaaatggaattcaccataatttttcagccccaagaacacctcagcagaatggtgttgtggagaggaaaaatagatcccatgaagaaggaactataacttttacaattgaaacaaagttacctaagtacttttgggctgatgctatacatactatttgctacactttgaacatagtaattataagacctacactaaatcttatgaactttataaaggaagaaaacaaaatatatctcacttgagggtttttggttgcaaatgttttattttaaacaatggtaaagattctcctag

SEQ ID NO: 17443 - DNA, 424 bp, Glycine max
ttgaatgctctattcaatggagttgacaagaatatcttcagactgatcaacacatgcacagtggccaaggatgcatgggagatcctgaaaaccactcatgaaggaacctccaaagtgaagatgtccagattgcaactattggccacaaaattcgaaaatttgaagatgaaggaggaagagtgtattcatgacttccacatgaacattcttgaaattgccaatgcttgcactgccttgggagaaagaatgacagatgaaaagctggtgagaaagatcctcagatctttgcctaagagatttgacatgaaagtcactgcaatagaggaggcccaagacatttgcaacatgagagtagatgaactcattggttcccttcaaacctttgagctaggactctcggataggactgaaaagaagagcaaga

SEQ ID NO: 17444 - DNA, 408 bp, Glycine max
tggtacttctactgaagctgagtttctaccctccttctgtcctgacatagaatctctagtgcagctgaaggatgctatagggttcttgatccttcagattcagtctttgtttcttgtttgttctttttcttggatttatctctcattaaaaaaatatcaatgaaaaatatgatggattaactggttttcctttttctggtatcggagaaaagataatgattttcattggtctcattattcagtatttggatttgtacattttttattggttattatctattcattcattatattagtaaattttagttgtttttaaataacaatatttgatgccaaaataaaataaaatgattagaactcaaggtattaattaataactattatttcatttatcatttataattattt

SEQ ID NO: 17445 - DNA, 353 bp, Glycine max
tgcttatactttttattaaaataccactaatcaaattttagatgaagttgaacaacatcctgtggtaccttacagattcattatgttaattagcatatctttaaataagtgggctaatgtaaaattattcacaattatctatttgaagatgatgatacgtatatattttaaggataaaaagagaataaaatattctaagctaacaattaatattgcaacaaatactactttatgtatcattccaaaacatatgagtgattaccatactatattatttattgaattctgaaataaacttttagatagtggaacatagttaaatgctagctaaaatgactcctcagatgtagcta

SEQ ID NO: 17446 - DNA, 424 bp, Glycine max
tagccaaacattaatttaaaattcttacaagtattgcttaaattatctacgaattatggattgaaatcttgtaaattaatgaatccacttttaccaaaatttattgcttcttttcttactctaaatgtttgcataaacttttataatatttacataacctttaggtgatatattcaattattcattataatttttttatctagaggatttataacaacaactcatgtacctttatttaactaattgaactaaatttcttgacatccattaacattttttataatataaaactaatagcagtaaaaatatattatcaactattcagtaacaattataaactgccttttgtttccctaatttttgtttgtttttaaaaaaatcttataaaagcacaaatagactcagattatgttaccaaaatgat

SEQ ID NO: 17447 - DNA, 372 bp, Glycine max
tgcttgacttgtcttgttaattggtatacttaaataccaataagcataagatattatttctaaattttaaccttttgaagctctagatgctgacgagcttgacttgttaggttgtttatttatataaacaataagcgtcagaggctccatgtgaatgtgttgggatgaatgatgtgatacattaacatttttggttggaagattttcagtactaagtgacaacttggacttgccactgaaaatgtaatagaataatatgttgcaagtcatggttggtcttaaaatataaaaccagaggggtaaatttaaagcaagttaccttgactgaaaattgcctatccaggtatgcaaatctggtcatttacatgcaat

SEQ ID NO: 17448 - DNA, 402 bp, Glycine max
tgcatgcatgtgaagagaaagccagatggaaagtgtatcattcatgagtttataaaggaacataatcatgaacttgtaccagctctggcatatcattttcggattcatagaaatatgaaattagctgaaaagaataatattgatatcttgcatgctgttagtgaacgaaccagaaagatgtatgttgaaatgtctaggcaatctagcagctgtcaaaacattgggtctttcttgggtgacataaactatcagtttgacagaagccagtatttggctttggatgagggagatgcccaagttatgcttgagtattttaagcatgtacaaaaggagagtcccaacttcttctattctatagatttaaatgaagagcagcgcttaaaatatctattttggattgat

SEQ ID NO: 17449 - DNA, 372 bp, Glycine max
agcttttatctcggaggcccgattcatgcgcataatatatcgagacgctcgaaattgaacaacggaagctatcgagaaattcaaatggtcaatacttcgaactcggaggtcctattaaggcgcataatatatctagacgctcaaaattttacaatggaagctctttggctatacaaatggtcataacttttcactcgaaggtccgattaaggcgcataatatatcgagacgctcaaaattgaacaatggaagctcttgagcaattcaaatggtcataacttgtcactcggaggtccgattcaggtgcataatatatcgggacgctcgaaattgaagaatggaagctcttgagcgattcagatggtcataact

SEQ ID NO: 17450 - DNA, 409 bp, Glycine max
ttgatgtaacattaggagaggttaatgaaacaacgtgatgatgcgcttcatgagaggttggatcaaatggagaatagagaccatatgaattgctcaagagcttccattgttcaatttcgagcgtctagatatataatgcgcctcaatcggacctccgagttaaaagttatgaccatttgaaatgctcaagagcttccattgttcaatttcgagcgtcacgatatattatgcacctgaatcggacctgcgagtgacaacttatgaccatctgaattgctcaagagcttccattgttcaattttgagcgtcacgatatattatgcacctgaatcggacctgcgagtgacaacttatgaccatctgaattgctcaagagcttccattgttcaatttcgagcgtctcgatata

SEQ ID NO: 17451 - DNA, 428 bp, Glycine max
tctagaacttggtacgaaaaactaagttcattgttcttgaaaaatggttttaagtgaggaatagttgacataacactctttcgcaaaaactaagattatcaatttttattagtgcaagtatatgtagacgatatcatttttgatgctactaatgaaatgctttctgaagatttttctaagttgatgtagacgaaatttgaaatgagcatgatgggagagcttaaattctttcatcgattacaaataaaacaaacacccaaaggcttctacattcttcaaaccaagtatgtgaacgaattgctgaagaaattcaacatcgacaatgcaaaagaaatgaaaactctaatgcaccccatgacatacctcggactgaacgagtaatcaacaaaggaaagtttgtctatgtggaagcaatgattcactcacta

SEQ ID NO: 17452 - DNA, 410 bp, Glycine max
tgttaataattttctttgcctcatattttgaaggatgaaacttttctttttcaaatgtgtcatttaacaaatccaatatcatagtcattgccttgttgcttaatccacacaaaacttttatatgatataatttgattataaattcaagttttgtgtacttgcttccttcatacaatgtttgactcccatcgtttagaagctcataaaagccattatgatcttctcttggttcatcatttactatttcatcttcatttaatggttgtgatgcacctacattaaggtcatgttgcctatattgttcaaatgcgtcattgatcatcatttccattgggttttgaggttgaacaccactatctcggaaaacatcttccacttgagaagattctaatgcttgcttttcaccatga

SEQ ID NO: 17453 - DNA, 415 bp, Glycine max
tcgatctaattcttctctaaaacaacttgggaagctatattacttcttgggaattgaagtcaagtctatggctgatggctctattcttctaactgaaagaaatacataagatatcttctacagaaaactaaaatggcagaggctcaacctatatcttctcccatggtttctggatgtaagctcactaaaacaggagcagatatattctcagaccccactctgtatagatcagtggttggagcactccaatactccaccataaccagacctgagcttagttttgctgtgaacaaagtatgtcaattcatggctaatcctcttgaaacacactggatagctataaaaagaatcctcccatatctaaaaggctcgttacatcatggtcaagtacttgagctatacacgagctgagtat

SEQ ID NO: 17454 - DNA, 377 bp, Glycine max
agtttgtatggttaaagtctcacgattgtcatgtgctcatgcaacaattgttagtcgtggctatacgagacatcttgccaaacaaagtcaggttaacaataactcgcttgtgctttttcttccattctatatgtagcaaagtcattgatccagtcatgtttgatgagttggaaaatgaggccgcaattatactgtgccagttggagatgtattttccccctgctttctttgacatcatgattcacttgattgtgcacctggtcagagaaatcaaatgttgtggtcctgtttatctacggtggatgtacccggttgagcgatacatgaagatcttaaaagggtatagaaagaatctatatcgtctagaagcatttatt

SEQ ID NO: 17455 - DNA, 394 bp, Glycine max
  unsure at all n locations
ctatgctgatttttcttcacttgaactcctcaacctctgtagcgcaatcagcctctgctgaaccaccatgacctctccagcgcttggctcaatcccggacggcggaatcatcccctccttacatggtcgaatccttcacagcagcagcaacaacaacaacaaccttattttcaaaatgctactggcccaagcagaccatacgttcctccaccaatccagcagcaacaattgcaaccaccctataaaccagcataagatgaagctgcttcgcaaccttcccttgaagaactcgtgaggcacatgactatgccaaacatgctgtttcaacaagagaccagagcctccattcacagctnaactaatcagatcggaccaatcgctacacagctcaatc

SEQ ID NO: 17456 - DNA, 374 bp, Glycine max
agcttgtatgccttggatcttcttcatcaacggagtcctttgcttcttgaagttcaatggaagcggaatggagaaggaagaaagatgattggagatgccacttcaaggagaagatgagtcaagaacaagctcaccaccataagaagccatggataagagcttgaaggtaggagaagatgagtggagggagaaggagagaaggagcacgaaatttagttcctcaaatgaggtatgaactttgaagtgtaattctcaaatgatcaaagttcaaaaaatacacacatatggcctttatttatagcctaagtgtcacacaaaattgtagggaaatttgaatttctattcaaatttcacttgaatttgaaattgaattt

SEQ ID NO: 17457 - DNA, 362 bp, Glycine max
tgcttattccgatctttatctctctattcattacagcagagatgaacttaattgctgaatgacagtcttcacatatcctaaggatcttgacaatcctgagagtcactccatcgccagttttcatcagcccaaatgccaccgcaagcttctcactgtggtacctgacggcatactccctttcttccccttacaactcgtgcatcgcggactctggcacgggtgcatagcctgcatccttgcacctccatatcaactcatccaagaaactataaatctcattagtctcacggtgagacttgtcacccatgctaaaaagataactactattgtcaacatctatggtgctataacccacttgcttc

SEQ ID NO: 17458 - DNA, 382 bp, Glycine max
agcttcctagaatcaagatcaagattcaagactctagattcaagaatcaagagaagacttaatcaagataagtatgaaaaagttttttcaaaaaactgagtagcacatggatttttctcaaaacatgtttaccaaagagtttttactctctggtaatcgattaccatattgttgtaatcgattaccagtagcaaaatgtttttgaaaaagttttcaactgaatttacaacgttccaattgatttcaaaaagctgtaatcgattacaatgttttggtaatcgattaccagtgtgcttgaacgttgaaattcaaattcaaatgtgaagagtcacattctttcacaaaaaggctttgtgtaatcgattacactaatttggtaatt

SEQ ID NO: 17459 - DNA, 375 bp, Glycine max
ggaagcggttatccgcctgaaaagatatgaccattttaatttctcaagagcttcagatgttcaatttctagactctcgacatattatgcgcccgagtcggacattcgcgtaaaaagttatgaccatttgaatttctcgagagttttcgatgttgaattttgagcgtctcgatataccataagcctgaatctgaccttagtgtgaaaagttatgaccatttgaatttcacgagagcttgcgttggtcaatttcgagcgtcactatatgtgatgcgccaaagatggacattcgagttaaatgttatgagcatgtgaatttctcaagagctgtccgtgatcaattctgagcggctcgatatgttgatttgcctgaatc

SEQ ID NO: 17460 - DNA, 393 bp, Glycine max
tgtgttgtgtgtagtttcagttgtgctgttcttctgtccatatttggttgtctcaaacttggtaccttagttaatatttttggtgttctacttattctgttgttgataattaaattatttgttttaggtattataaaatttgtatgctatatttgttctacgtattctaagtttgtatgttattatttgtgttacatatatatggtaccttagtttgtatgttaatattatttgttttaggtattctaaattattattcaaatatatggtacgttagtttgtattaattttgtatatatattgtttaaatttttctttgcatattaatttatgttattcaaatatatattgttttatttatttaaatttgtctttgcatgcattttaatttat

SEQ ID NO: 17461 - DNA, 377 bp, Glycine max
agcttgatggtaaactagatgtcttggttaacttggcaacccaactggccatgaatcaaaaatctgcacctgtcaccagactctgtggtttatgctcctctgccgaccaccacacagacctttgcccttctgtgcaacaatctgaagcaattgaacaacctgaagcttatgttgcaaacatctacaatagacctcttcaacctcagcagcaaaatcaaccacaacagaacaattatgacctctccagcaacaggtacaatcccgggtggaggaatcatcccaaccttagatggtcgaatccttcacaacagcagcaacaacaaaaacagccttattttcagaatgctgctggcccaagcaaaccatacgttcctcca

SEQ ID NO: 17462 - DNA, 239 bp, Glycine max
agcttagcagcctttctttcagtgtaatgccccctttccacaatcctatcaaacaactcaccccctgcacagagctccataacaacatgaaccgcgacagcgtcctcgaaagcctccttgatggagatcacgttaggactcccagccaagtggtgcattatttgaatctccctccttacatactgcacatcctgatatgtcaaaagcttcctgctcgataatgacttgcgtgcatactc

SEQ ID NO: 17463 - DNA, 331 bp, Glycine max
aacgtcaatagcggacttcctctgaaaaattacaacaccatctcctgactgagccacctcaatacctaggaagacttctaatgtccctagtctttggtctgaaaatgactgaataagtgctcctttagctaaccaatcttagtagcatcattccctgtcatcactatatcatcaacatatactatcacataaacacacttctcagaggatgaatgacaataataaacagaatgatcaacctcactacgtttcaatccaaaaagtcgaacattatgactgaatttaccaaactaagcccgacgggattagcttcacccatagagagatcaac

SEQ ID NO: 17464 - DNA, 296 bp, Glycine max
  unsure at all n locations
attgattctcatgcagaatttgaaggccaactatcatgtcttgcagaagtattgtcatgaagtcacagtcagtgtgctttgtaatgcccatggtgagttcaggttcaggccattgtggatagtattgacccaaaatataaagtgcctcagcgcagtccatttctttgaagtaagaagggttaatgccaagagcctctgacaatagctcanagattgtaatgcccaacacccttacttttttggtatattcagccacaatatctctgcgaaagcatgattatttcatcaatgacaag

SEQ ID NO: 17465 - DNA, 420 bp, Glycine max
  unsure at all n locations
tgaaggagtttattgcatcagggaattatttcactttaaaagtgggtcctaattggattcctaattttcaacttacctatttggatgtgacatcatggcagataggtcccaactttccatcgtggattcaatcacaaaacaaacttcaatatattggactgtctaacacggggattttagattctattcccacttggttctgggaaccacactctcaggttttgcatttaaacctctctcataatcatatccatggtgagcttgtgactacattacaaaatccaatatctatccaaactgttgatctaagcacaaatcacttatgtggtaaattaccctatctttcaaatgatgtgtatgagttagacctttcaaccaattcattctctgaatccatgcaagaattnttatgtaacaatc

SEQ ID NO: 17466 - DNA, 422 bp, Glycine max
tatgcttttctttatattgtcacacagatttcatattcttaatggctgctgttttttcagacacttcctatttttcttgatggccttgttactgcatggggcgctatcctaatttctgtgacattaattcttttgtttggtgaggtgagaaagttctgtccttatatgattttaagtataatacattcatgtcacagattaagtgcttgtgttgtttgtttagaggttggaacctggaacaaaaatctggtggcacagcacccgttttgtttggttcacgttttttccatttgtgaaagacattttttgttaattagaatcaattccagttaaagtgggaaccagtagcttctcattcctctaatgttatgtctggcaataaaaaatgttcagatgctattatcgatcaatgtaatgaatat

SEQ ID NO: 17467 - DNA, 346 bp, Glycine max
tcgattacattgttcttgaatagttctccaatctttgggaagaacactttaatcaatcaaaatggtaataatcaattacttctttgaaataattgattacattgtatatttaattgattacaggcaggtattacgagctggtataagctagaataacattattagataatatgttctttacatcggttatttatgactttcaacatcgtgttttaaatcgatgttgaaagtaccgacgttgataggattattgttaacatcggtttcttaataactgatgttaacgaaaattaccacatcgatatataataaccgatgtgctatatgaatacaccaaaaatgttat

SEQ ID NO: 17468 - DNA, 328 bp, Glycine max
  unsure at all n locations
ggccaacaggtttagccttctcaatgtattctgaacaaaatttaatggcttcttctgcaacgtacctctcaacaatagatgcttctggacgatatagattctttttatacccttttaagatcttcatgtatcgctcaaccgggtacatccaccgtagataaacaggaccacaacatttgatttctctgacctgatgcacaatcaagtgaatcatgatgtcaatgaaagcaaggggaanatacatctccaactggcacagtataattggcagctcattntncaactcatcanacttcacaggatcaatgactgtgctacatatagcatg

SEQ ID NO: 17469 - DNA, 323 bp, Glycine max
gctcttggagggaatggaagagggatatgctgcttctctttagattcacctgcatataaattgttaggtaacttactctttaaattgttgtcatcatctttctctggagtacagtgaggttgggcacgttcatttgcggatgacgaagatgctactggttgaggtccttgacactgctttcctgaccttaatgtaatggcactcacatttttgagattttggacagattgagaacgtaatctatcagaaatctgggactgttgctgatctaactgtgtagccaactatcccatctattagttaagctctaatggaggctttgg

SEQ ID NO: 17470 - DNA, 419 bp, Glycine max
  unsure at all n locations
nttctttgtgggttgatggtgttttgtcacgtagaatggcgtgatcactggttgacattctcaattagcttagttgcttcttcttgggtctttagctttattttccctgctgcagaaacatctaacagttacttggtttgtggtctcagcccatctatgaacatattcaattggattggctctgaaatcccatgggtgggagttcttctcaataaacctctgaacctctcgaatgcttcactcagagattcatcacggaactgatgaaatgaagagattgcagctttccctttcgcagtcttggactctggaaagtatttctttagaaacttttcaacaacttcttcccaggttttcagactgttacccttaaacaagtgaagccacctcttggtctctcctaccaatgaaaatgagaa

SEQ ID NO: 17471 - DNA, 435 bp, Glycine max
  unsure at all n locations
taggtctatccactaggattgaaagatggatgtttcttgatttgtttgataaattaagtagtcaatcttatatatggtgtttgtaaagttggactcattaagaaaggttaatagaattatttgattacaaatagacaattatttataacttttaaagtaataataataggatttaattatcattttggtcttgaaatttgattgatttttaaaatttttaacataataaattgatactttagaataattnttattatgacaattttaaaatacaaattcaaacaattaaaaagtaaaaattaatttatttcaactaaaaatcataaaaaatgtcaatttattataccaaagataaaaaagtaatttataaaaaataagggcaaaaaaatatacaaaccccaaattcaaggacttatgtctaataataataaaaac

SEQ ID NO: 17472 - DNA, 432 bp, Glycine max
  unsure at all n locations
ntgaggaaattcaaacgacaataaatttttactcgtatgtctgattgagtttcgtaatatatcgagacgctcggaattgaatgttgaaggtctgagcaaattcaaacgacaataactttttactcggatgtctaatttagtcgtataatataacgagacgctcgaatttgaatgttgaagctctgagcaaattcaaacgacaataacattttactcggatgtctgattgagtcccgtaatatatcgagacactcgtaattgaatattgaagctctgagccaattcaaacgacaataactttttactcggatgtctgatatagtcccgtaatatatcgagacactcgtaattgaatattgaagctctgagccaattcaaacgacaataactttttactcggatgtctgatatagtcccgtaatatatcgagac

SEQ ID NO: 17473 - DNA, 301 bp, Glycine max
ctctgatggtagtcatctttacaactggagagaagatctttgtgaaatcaattccttgtttctgctgaaaccctttcaccacaagtctctccttgtatcttcttctaccgtcagattcttcctttagcctatagacccacctattctgaacgctttctttccttctggaaatttagttaaagaccacgttctattcttctgaagggatgtcatctcatctttcatcgctagctcccacttaatagtgtcattcccctgtgtaggctcactgaaacattctggctcaccagcatcagttaac

SEQ ID NO: 17474 - DNA, 425 bp, Glycine max
  unsure at all n locations
gaggctttgcatatataacttatacacactcattaatatgaccagattaattacaaagtgtttaactatcttagctgagaatgaagggggtatcttattgaccaaaaataacgtaatgcttatcttcctagctaggccctaagtccaaattctaagatggtatcaaagttatcctagatccattgctgggccatctacattgccatgctctaagccgatgccttgggcatgatgagagagttctaaacccaccttaattgcggtcactcgttacctactctagctgtggcctttttggggtctaccttaattgtagcctcaagggtggcgtttactcccacattgattacagatattccttanataaaataagcgttacaagtgcgtgaaaccctcactcttgagctaactattgtggtcgagtc

SEQ ID NO: 17475 - DNA, 283 bp, Glycine max
caataaggcttgcaaggtgcatggcattgggactgtcagactgagaatgtttgacaacagggaaatgctgctgcaagatgtgaggtatgttccagaactcaagataaaccttatctctataagcatgtttgaccttataggatacactacaaaggttgaggatgggatgatgaaggtgtccactggagcctcaatcattgctaagggaagccgaagcaatgggttgtacatcttggaaagatccacagttattggacaagcattctgttgcaagtcaaacaat

SEQ ID NO: 17476 - DNA, 370 bp, Glycine max
atgttttagacctagtaattgtcttagaatgggagctattctaagatgatttcgttgtcatagtcatcttatgtaacacccttattttttgtaaaataaattaaaacagattttatttaaaaataaatagggtttacgaaaataatgaggtttctgaattaaataaaaaggaggaataatttattaataaaaatggtttaagggaataataaattatttctagaaataaaactgttattattattaataaagtaataagtctttttaaatataataagaaatgagtatttcgtgaagttctcactataaaagaccttgcatttactacatcgccttctttttcttaatcttttctttcttcaaccttttc

SEQ ID NO: 17477 - DNA, 429 bp, Glycine max
  unsure at all n locations
tgacacattctggcattgtgcaccaggtgattcaaattcatgaattcaattattgcaactcagaacaatgcaacagcaaaaaggtttcccactgaggaaactgttgttgatggggaagacataattagcaagttgcatgaaagcattcttggtcacattctgtctttccttccaacaatggaatcagtccacactagtgtgttatcaaaaaggtgggttgatgcttggaaatccataactggcctacaatttaatgatactttgctttgttttgggaaaaagatgcaaaaagaacagtttgtgtgttttgtgaacatggtgtttcttcaccttgccaattcaagtatccacaatttctctctttgtttaacacgttatcagtatgattcaaccttgataagtgcatggatctcctttatctntaaaagg

SEQ ID NO: 17478 - DNA, 351 bp, Glycine max
  unsure at all n locations
ggagatggctaggtgtttgcttcatgaaaaagaattgccaaagagattttgggcggaagccgcaaatattgcagttttcatgcttaacagactgccaacaaaagctttgcaaaagaagacaccatttgaagcatggtatggctataaacctgagttgctcaatctgaagatatttgagtgcttgtgctttttcttacattcctcggggtaagaaggacaaactagacatgagagcagaacctggaacctttgaggctatagcttaatttcacaggcctacatgatctanttgccacatcatgacaagtattgtagcagaatatgagattctggactggatantggaactgg

SEQ ID NO: 17479 - DNA, 412 bp, Glycine max
  unsure at all n locations
tgtgcaccaatgcactctccatgagaccattcgtgtaaaaagtggagcctgggatgacaatggtgttttcatctacacgacattaaatcacatcaaatactgccttcccaatggagatagtgggataataaagacattggatgtccccatttacatcactaaggtttctggaaacaccatcttctgcttggatcgggatgggaagaaaagagccatagctattgattcgactgaatatatttttaaactctccttgttgaagaaaaaatatgaccatgtcatgaacatgataaagaattcgcagctttgtgggcaggctgtgattgcttatctccagcaaaaaggctttcctgaggttgccctccattntgtgaatgatgagagaatacggttcaatttggcgttggagagt

SEQ ID NO: 17480 - DNA, 338 bp, Glycine max
tcagcccatctatgaacgtattcaattggattggctctgaaaacccatgggtgggagttcttctcaataaacctctgaacctctccaatgcttcactcagagattcatcagggaactggtgaaatgaagagattgctgctttcccttccgtagtcttggactctgggaagtatttctttagaaacttttcaacaacttcttcccatgtttttagactgttacccttaaatgagtgaagccacctcttggcctctcatgccaatgagaatgagaataggctgagtcttatagcttcatctggcacaccaacaatcttaacagtgtagcatatttcaatg

SEQ ID NO: 17481 - DNA, 338 bp, Glycine max
aggtgatgacattggaatatgtgaatgtccattaatctgatgcatgactaacgagaaccacccttacaactacgtagactcataaccggagataggtttgaggtcaagatctaatctagagaattagttggtagatgtgcacaccaagcttgaacattcattccggaccctttatgtgagcatcaatattatggatcggctcctagcagttaggacaggtgcaaggttgggaatgttattggttggcatcagagtcatgctgagggcatgcaaaattgaagagatctgatcccttctgatcccttgaggtaataaagatatatatacgcgtcgatgtt

SEQ ID NO: 17482 - DNA, 365 bp, Glycine max
  unsure at all n locations
aacctgttccattttactgatcgttgatagacatatattataacaaataggcgacatataaataaatgaattaaatatgtttgttttaataaatgatcgaattgtattctggatctctaataaaagaatctattattttgagtcattaatatattaaaaatcttgttttgaatctctcttatcagntatgtgatgatgtgatatcatcacaacccattaataaaatttgaaaaattaatttgtaaggtgatacgtcatctgctcactaatgataaagattaaaaataatacttatattatcaaggacttcaaacaccatactaaatcattacacatgtgtaataaaataatcatttattattgac

SEQ ID NO: 17483 - DNA, 420 bp, Glycine max
tctttgagaaaacttccttgagaagcttgagcttatctacacacacccatctaaaaactaagctcacctccttgagaagcttccttgagaagctagagcttagctacacacacccctctaataactaagctcacctccttaagaagagaagctagagcttagctacacacccctataatagctaagctcacccccatgacaaggctaaaaaatcctacatttctagggtacccgacctacattatggagccctaaatacaaggctaaaaaataatgaaatcctagtctaatatgtacaaagataagtggacccaaccttggcccatgtgctcagaaatctaccctgacgttcatgagaaccctagggccttcttcagtagctctagcccaatcctcttggagccttttgctcatggctct

SEQ ID NO: 17484 - DNA, 420 bp, Glycine max
  unsure at all n locations
tgatcctcatcatcaatagcaacatctatattttctatatcaagaatcagtttattaaacaaatccaattgttctactactgatctatcttcaatcattttaaacgaatacaaagactgctttaggtaaagacgattaactaaagatttggtcatgtacaaaccttcaagctttaaccaaatcccagcagcagttgtttccttagagacttgcctcagcaccttgtctccgagactgaggataattgcattgtgtgccttctgcagtagtgctttcttatccccatcagccatcatcttttcaagtttggcttctccatcaagtgcttccaccaggccctgctaaacaagaatagctctcatcttcaatcgccatagcccagaatcattttgccctgtgaatnnntcaacctcatacttg

SEQ ID NO: 17485 - DNA, 416 bp, Glycine max
tcttatccaagacactttcttggtggtgaagcttcttcttccatggcttattctctagtggatggtgcctcctctcacctcttctcttttatctttcgctataactccatggctgaaaatcaccattgaaggaccttattgaagcttaaagatccaacctctatgatgcaatcctaccccgcaagggcattgggtagaagactcaaagtagattgggctagagatccaagggaaggccctagggttctcatgagccttaaggtagatttcgagcccatgggctaagtatgagcctgcttatctttgtaaatattagaataggttttcccttcgtctgggccttgtactttggccattctaatactatagggttttagccttgtatttcgaggcattttgagtagtttttgtagtaa

SEQ ID NO: 17486 - DNA, 354 bp, Glycine max
  unsure at all n locations
tcttctgattgagcaacctcaataccaagaaaatacttcagatatcccaaatctttggtctggaagtgactaaacaagtgttctttaagttgggcaatcttagtagtatcatttcctgttatcactatatcatcaacatatacaattagataaacatacttctcaggagatgtatgacaataaaaaacagaatgatcagcttcacttcatttcaacccannaagttgaacggtatgactaaatttaccaaaccacgctcgagggattgcttcaacccatagagagatcgatgtagcttacatacgagaatactcccnctgagcaacaaacccaggaggttggctcatataaatc

SEQ ID NO: 17487 - DNA, 379 bp, Glycine max
  unsure at all n locations
tcagacaatccaaataattaagagacattatttttctgtcatgagcatctttaatgttaaacattagtatatcttcgctattaaacatcattagaccaatagagttgcctaactttatttttatgagctctattatataacatctttaataaatntaacaacttttttcactttttaataatgtaactcttcatatctaacttaaaatagatctaataaattattgtagatgtttatatttttttaataaggaattattttaatattaaaaacaggttcttgcaaaagaagaatatgtgtagtctcttgtcatctanataactctaatagtanaagtggtataaaattaattgttaagttaataaagtcttaattaaga

SEQ ID NO: 17488 - DNA, 426 bp, Glycine max
  unsure at all n locations
gacactcagagtactcaagcttgttagtttgtcatccctttcattagttntttttttatacctaaaattgatttccagtgcctgttaatttatgcaggatttaccaagtagcaaatgtgaaatctgaatggaactgtatcaaaaccttccctgatttatctggaacaggttttatacctttttcccattgttcattattccttgagggtttgatgatttcatgtttgttcagttactaatacacaactcgaactttttcttctcagggaagaacacgtgtgtaaaatttggtccagattctaaatacatagctgtgggatcaatggaccgaaatcttcggatattcggcttgcccggtgaagatgctcctactgagtcataaaatgcctcagttgtacaagccanagtcttgctctggagtaaaca

SEQ ID NO: 17489 - DNA, 251 bp, Glycine max
atatcgagacgctcgaaattgaatgttgaagctcttagcaaattcaaacaacaataaccttttactcggatgactgattgagtcccggaatatattgagacgctcgatcatgaatgttgaagctctgagcaaattcaaacgacaataactttttactcggatgtctgattgagtccgatatatatcgatacgctcgaaattgaatgttgaacctgtgagcaaattcaaacgacaataacttatttctcgga

SEQ ID NO: 17490 - DNA, 418 bp, Glycine max
  unsure at all n locations
tcaacatcagaccacttccagggtgctggaactacttcacatggacttgatggggcctatgcaagttgaaagccttggaggaaagaggtatgcctatgttgttgtggatgatttctccagatttacctgggtcaactttatcagagagaaatcagacacctttgaagtattcaaagagttgagtctaagacttcaaagagaaaaagactgtgtcatcaagagaattaggagtgaccatggcagagagtttgaaaacagcaagtttactgaattctgcacatctgaaggcatcactcatgagttctctgcagccatcacaccacaacaaaatggcatagttgaaaggaaaaacaggactntgcaagaagctgctaaggtcatgcttcatgccaaagaacttctctataatctctgggct

SEQ ID NO: 17491 - DNA, 421 bp, Glycine max
  unsure at all n locations
tcaacattcaattntgagcgtctcgtaattntactgtactcaatcagacatccgagtaaaaatttattgtcgtttggattggctcagagattcaacattcaatttcgagcgtctcgatatattacgggcctcaatcagacatccgagtaaaaagttattgtcgtttgaattggctcagagcttcaacattcaatttcgagcgtctcgatatatgaccggactcaatcagacatccgagtaaaaagttattgtcgtttgaattggctcagagcttcaacattcaattttgagcgtctcgatatattacgggactcaatcagacatccgagtaaaaagttattgtcgtttgaattggctcagagattcaacattcaatttcgagcgtctcgatatattacgggactcantcagacatccgagt

SEQ ID NO: 17492 - DNA, 414 bp, Glycine max
  unsure at all n locations
tcttagtttcagatgatgcagttgagtttgtagctactctcatgcactcctctaatgactatagcatcatttatggcgctaaactgctgggagttggaagccatcttcacaattaaatttctggcttcagcaggagtcatgtctccaagggctccaccactggcagcatctatcatacttctctccatattactgagtccttcataaaaatattggagaagcaactgctctgaaatctgatggtgagggcaactggcacatagttntttaaatctctcccagtattcatacaggctctctccactgagttgtctaatacctgagatatccttcctgatggttgtggtcctggaagcagggacatttttttctaagaatactctcttcaagtcatcccaactcgtgatggacctt

SEQ ID NO: 17493 - DNA, 360 bp, Glycine max
  unsure at all n locations
ctgtcatcatgccgagactcaggaaggccaataggtttagccttctcaatgtattctgaacaaaattcaatggcttcttctgcaatgtacctctcaacaatagatgttgctggatgatatagattctttgtatacccttttaagatcttcatgtatcgctcaaccgggtatatcctccatagataagcaggaccataacatttgatttctctgaccagatgcacaatcaagtgaatcatgatgtcaaagaaagcaaggggaaaatacatctccaactggcacagtataattgcggcctcattntccagctcatcaaacttgacaggatcaatgactntgctacatatagcatggaagaaa

SEQ ID NO: 17494 - DNA, 386 bp, Glycine max
  unsure at all n locations
tttagctaattntatcgaacatatcttatataagctaataactaaaaaagttacaagctactactagtatgtttggtacacaagcttattttaataacttgtttttcataagctactttaaataacttattttcattaactgctttgaaataacttatgaaaaataagttataagctactggtttttttcttctcaattttatctattttatttgaaattttattttatcatttcattcaactaaaaatccctcatcatcttttattttctgtctggaaaaatgctcttatcttttattagtttgttgaatgtcaaactatttatgtcaataaactattacattgcttattgtaatttattattaaaatattttggtactaaacaa

SEQ ID NO: 17495 - DNA, 413 bp, Glycine max
ttagcgaattactattgttattgaaaaatatgcttcttgtagataacatgctaccgaagaatcattatgaggcaaagaagatattatgtcctattggaatggaataccaaaagatacatgcttgccataacgattgtattttgtataggcatgagtatgctgaattacgcaattgccctacatgtggggtgtcatgctacaaagtcaattccaacgattgcagtgaacatgctagctcatacaaagatcgtccatccaaagtgtgttggtatcttccagtaataccaaggtttaagcgattgtttgctaatgcagaagacgcaaaaaacctaacatggcatgctgatggcaggatcaacaatggattgctctgtcatcctgttgattctcctcaatggaaaataatagatcag

SEQ ID NO: 17496 - DNA, 269 bp, Glycine max
atcatgcgcctattgccaccgtcataaatataggtattttgagaatacatcttaaagaccaatggttaacgatggctctaatgggcggttttgcttgaataaataataatgagatcattgctttagtaaatgatgcggaaaaggatagggacattgatccacaagacgcacagcaaactcttgaatagcaaaagcttatttgaataggcggaaggcaagagacaaacaattgaagcaatctagctcttgacgagctaggacacgataga

SEQ ID NO: 17497 - DNA, 390 bp, Glycine max
  unsure at all n locations
taactctcaaattccncttcatcccaggctctntagtataagctttccttcattanggacaacaacctcagcaccaggtttgacaatatctgtcaatgggatcatgagactccttccgtccaatgtggtgagatccaacgttntaccagtaaaggcctcaagaaaggttatctcttggttgatcaccanatcattaccatcccttctataaagagcatgcggcttctcatctatcacaaaaatgagatctgctgggatgacaccaagctcacggntacctttctctggaaaggtaatttttgttcctttcttccagccaggttttatctcgatagtcaaaatctcctccacatccccacatttgctgaaatggaattgcatgtgtcaaat

SEQ ID NO: 17498 - DNA, 421 bp, Glycine max
  unsure at all n locations
gagttggagtgcacattgtattatttattgtggagagccatgaaagaagcaaagcaactagtggaaaggaatgagaggaaacaatatgtcaaagtatttgattatgcacatgaattattgaggagcaatcctggatcaacagttaagatcaacatagtgccaagcccagaaggtccaccacaatttcacaggttatatatttgtcttgctggctgtaagaaggggtttgttgctggatgtagaccattcataggtctagatggatgtttcctagagagtgcatatggaggaaacttgctctctgctgttgggcttgatggcaataaccacatctttgttattgcttatngtgntgcggacattgagaacaaagacaattggaaatgagttttaactgtgttgcataaagatcttggggatt

SEQ ID NO: 17499 - DNA, 332 bp, Glycine max
tagctttcagcaaattcaaacgacaataacttttttactcagatgtttgattgagtcccgtaatatatcgagacgatcaaaattgaattttgaggttctgagctaattcaaacgataataagtttttactaagacgtttgattgagtcccgtaatatatctagacgctcgaaattcaattctgaacctcagagcaaattgaaacgagaataaatttttactcggatgtctgattgagtcccgtaatatatcgagacgctgtaaattgaatgttgaagctctgaccaaattcaaacgacgataactttgtactctgatgtctgattgagtcct

SEQ ID NO: 17500 - DNA, 413 bp, Glycine max
  unsure at all n locations
tgtaaatgagctntatataccataagttcttaattatttaagggacattnggataaatactttaattaagcacttatttataagtttttatcaaaatttaagttaataattgtccccctaactattaaaataagttataaaaaatcttataaaaataacataaataacttttattagctcgaataaaccttatttatcaaaatagcttaccttatcagtataagtattaattacctctntcccatattttttaatatttaaggttattacacataaactaaanaatgatatattaaatacatcgatgtttcatacttgtactaatagtaataatgatattaattagactctaaaattctaaagtatcaattattttgaagagaagatgaaaagttagaatgtctaaaaataca

SEQ ID NO: 17501 - DNA, 411 bp, Glycine max
agcttgcactcaagattctccttgcctggcacttcaaaaccttctggttgggtcatatagatgtcttcctctaaatccccatgcaagaatgcagttataacatttaactgctcaaagtgaagattctctacagctgctatactcagaataactctgatggtagtcatctttacaactggagagaagatctttgtgaaatcaattccttgtttctgctgaaaccctttcaccacaagtctctccttgtatcttcttctaccgtcagattcttcctttagcctatagacccacctattctgtaacgctttctttccttctggaaatttagttaaagaccacgttttattcttctgaagggatgtcatctcatctttcatcgctagctcccacttaatagtgtcattcccctgt

SEQ ID NO: 17502 - DNA, 407 bp, Glycine max
  unsure at all n locations
agcttggattttcttttagtaaggaatctatccttcctaagatagagccaaacccaatccccctcattaaaaactagctcctttcttcctctattgcccttagttgaatacacctttgtttggttctctatgtgggtcttaaccctctcatgcaacttttttacaaactctgacctagattccccttcttcatgtataaaaagaagtgtcaagtgggaggggaatgaggtctaggggtgttaggggattgaacctatagacaacctcaaaaggggattacttagttgttctatgaacccccctgttgtangcaaattctacatgaggaagatactcatcccaagacttatggttgcctttcagaagagcccttaaaagggtggataaagacctattcactacctctg

SEQ ID NO: 17503 - DNA, 418 bp, Glycine max
cttggagagaacacaaagtggtaggcctatataagtctagtttagtgataggggaaaggagtaaacgtccaatgagtttgataaattttgcgaagaagaaggtgtcaacaggcagttgactgctggctatatacctcaacaaaaaggtgtattcgaaaataagaatcaaaccgttatggagatgactaggtccatgctttttgagaaaggaataccaaaataattcttgtccgaggctgttaatatagccttgtacctattgaatagatgcccaacaaaagtggtacggaatatgacaccatttgaagcatggagtggaagtgttgatggattggcaagtgcaccaatttgtaagaaatcgttggctacacgaatcattgaggtggggaggactataagacatgactgatgggatgga

SEQ ID NO: 17504 - DNA, 332 bp, Glycine max
ggacctaaaaactcaagctagcggtaaataggaacgcaacatctccctgcatactatagacagacagggaaatggaggctgcaaacttagtaccgcaattccttacaccaaattccacacttcgatataccagccacttgggaatgactttgtaaagcaagcaacgcttaggacaataaagagagtgactctggtggcaccatttggggcgtgctttgattcaagaaccattggcaagaccggtactggacccaatgtgccgacaattgatctgagtctcaaggggggagttcaatggagaatctatggtgccaattcaatggtcaaggttc

SEQ ID NO: 17505 - DNA, 400 bp, Glycine max
agcttccacaaccccaactatagtcctagtaagctccgctgcctgtctctcggtataatgcccacgctgaataatcctatcgaaaagctctccacctgcacatagttccatcacaacgtggacagccatggcatcctcatatgcacccttgatggatataacattaggatgcccagccaagtggtgcattatctgaatttctcttctcacatcctcgacatcatcatcggtgacgagcttcctctttgcaatagatttacaggcatactcctgtcctgttgccttctccacacacaagaatgttgtcccgaactgaccctgtccaagttttctcccaagagtgaagaactccttgaaattatctgtctctctttgcaacacagaatcaacacgaagccct

SEQ ID NO: 17506 - DNA, 411 bp, Glycine max
  unsure at all n locations
acagcttactaaaacaggagcagacctcnnctttattttatttttatagatcagnaggtggagctcttcaatactccactataaccagacctgaactaagttttgctgtaaacaaagtctggcaattcatggccaaccctcttgaatctcactggacagcagtgaaaacaattctcaggtatctcaaaggctctttacaccatggcctacttctcaaagctgccactcctcccattcccattaaaggcctttgtgatgcagactgggtgtctgaccctgatgatcacagatctacttcaggagctgctatttattttggtcctaatcttatatcttggtggtctaagaaacaacagattgttgcaagatcaagtactgaggctgagtatcgaagcccagcacaagccttct

SEQ ID NO: 17507 - DNA, 439 bp, Glycine max
  unsure at all n locations
tactcaagctttgctggtgtcgagaagatatcacatgttngncatcattataaatgggttagaatgcgaatgtatgtatacatgattttgatgatgccaaagaaaaatcaaacaaggttgcttcaaatgataagcatttgcttcaagaataattcaagagtgcttcaacaaacaaagccttgtttcaagattcactaaagaccaagccttgccttaaaacaaagtgctttcaagacatgcaaggctctggtaatcaattaccaggaagtgtaatcgattaccagaagacagggttgagaaatagctgttgaaaaaggttttgaatttgaattttcaacatgtaatcgattaccatatgtctgtaatcgattaccagcaacgaaactttggaaattcaaattcaaaagtcataaccctctcaaatataactgtgtaatcg

SEQ ID NO: 17508 - DNA, 436 bp, Glycine max
  unsure at all n locations
tgctaacccatggaagctcctaatatctccctcactttttgtggtgggccattcttggatggccttgattttctcaaggtccaattggaccccatttcttccagctacaaaacctaagaaaactatattatctacacaaaaggtacacttctctatatttgcatagagggtgtttttcccaaggactgaaagaacttgcctgagatgtcctaagtgatcatctaggctcctattgtacactaaaatatcatcaaaataaacaactacaaatctacctatgaaatcccttaagacatgatgcataagcctcataaaggtgcttggtgcattagtgagcccaaaaggcatctctagccattcatacaaaccaaacttggtcttgaaagcggttttccactcatcactctctntcatcttgatatggtgataaccactt

SEQ ID NO: 17509 - DNA, 390 bp, Glycine max
  unsure at all n locations
tcaagcttattaagtatatgtatataaatgtattaacataacattaaaatactaacataattatatatataaattatattaatgtaaaaaaaattaatatatatatatatatatatatatatatatatatatatatatatatatataacagacatataaattcagtacttttgtgcttacgagtcaaagtttttatacaagaaagtcgaagtatatatcttatttgatacaaactctnttttttttttgcagatccattgtaataatgagaaaaatttcggcatatccaaaaaaccggtcaataatatcaaaattagataaattggcccacaccggcttacaaatgggatggccaaatacattacaaaattntgctttcgccaatgatct

SEQ ID NO: 17510 - DNA, 437 bp, Glycine max
  unsure at all n locations
agtgaccatttgaataactcaagagcttccattgctcaattgtgtgcgtctcgaacattatgcgccttaatcggacctccgagtgaaaaggtatgaccatttgaataactcaagagcttccattgttcaatttcgagcgtctcgatatcttatgtgcctgaatctgacctccgtgtgaaaagatatgaccatttgaatttctcgagagcttccgttgttcaatttcgagcggctcgatatcttatgcgcctgaatcggacctccgagtgaaaagttatgaccatttgaataactcaagagcttccattgatcaattacgagcgtctcaatatattatgtgcctgaatcggacctgcgagtgaaaagttatgaccatatgaattgctcaagagcttccattgtccaatntcgagcgtctcgatatataatgcgcctga

SEQ ID NO: 17511 - DNA, 378 bp, Glycine max
agcttgctgccacggttttttccgactatgctcttgtgtggtggaacaagctacaaaaggagagagcaagaaatgaagagccaatggttgatacatggacagagatgaaaaagatcatgaggaagcggtatgtgccggctagttactcaagggacttgaaattcaagctccaaaaactaacccaaggcaacaagggggtaactatggctcgatttcttaatggatgtgctcatgattcaagcaaatattgaagaagatgaggaggtaactatggctcgatttcttaatggtttgactaatgatatcccgtgatattgtgagctgcaggaagttgttgaaatggatgatttgcttcacaaagcaatccaagtggagcaa

SEQ ID NO: 17512 - DNA, 439 bp, Glycine max
tctcgatatgttatgcgtctgaatcggacatgcgagttaaaattatgaccattttaatttcccgagagcttccgttgttcaatttctagcatctcgatacgctatgtgcctgaatcggacatgcgagtgaaaagttatgaccatttgaatttctcgagagcttccgttgttaaatttctagcgtctcgatacgctatgcgcctacatcgaacatgcgagtgaaaagttatgaccattttaatttctcgagagattccgatggtcaatttcgagcgtctcgatatgttatgtgcctgaatcggacatgcgcatgaaaagttatgaaccatttaatttctcgggagcatctgttgttcaatttctagcgtctcgatactctatgcgcctgaatcggacatgcgagtgaaaagtataaccatttgaatttctcgagagcttc

SEQ ID NO: 17513 - DNA, 373 bp, Glycine max
  unsure at all n locations
ggaccttgatctagctttataaatgcctattaatagacaaatgctgttttccgtatttatttggtttgaattcatacagggttgatcgagactgacttatttgtaatgaaatggaatttaaatttgtaattaagaacctgggtagaaagagtgaaagatagatctcactaaagtggtgagtaattntaccatcaaatttaatcattcataaaatcgatatatattaatttcatactaataatataaagaaaaatatcactcatttatgaataatcacacttaactaagaagtgtcaaaattatagcattaattcaaataaaaaaaataattaaggaatgtaagtatanattattaaattaaaaacttcatatg

SEQ ID NO: 17514 - DNA, 407 bp, Glycine max
ttctgcttgaaattgaaaacggaagctctaagaaaagtcaaacgacaataccttttaactcggatgtccgattgagccctgtaatatatcgagacgctcgaaattgaaaacggaagctctaagaaaagtcaaacgacaataaattttgactcggatgtccgattgagtctcgtaatataccaagaccctcgtaattgaaaacagaacctctgagtaaattcaaacgacaataacttttcactcggatttccgattgagtcccataggatatcgagacgctcgtaatttaaaacggaagctctgagaaaaatcaaacgacaataacttttaactcggatctctgatcgagccctttaatatatcaagacgctcgaaattgaaaaccgaagctctaagagaagtcaaac

SEQ ID NO: 17515 - DNA, 391 bp, Glycine max
gctgatctttcaacatcctccatcttttagaatttccaaagcatattttctttgcgaaatgaatatacctttcttggatcgagaaacctccatgcccaaaaaatacttcaagtcacccaaatatttaatctgaatcattaccagttatgaggatgtcatcaacatagatcaataaggcagtaaatgatttgcctttcttacatgtaaacaacgaataatctgcttttgattgaataaatccagcaccttgaatagttgtaaagaacttggcagaccattggcgagaggcttgttttaatccatataagggattgttgaggtgacacacaatgttctcccgctgtcgctgaacactaggaggaagagacatataaatttcttcagaaagatc

SEQ ID NO: 17516 - DNA, 376 bp, Glycine max
catgtgactgaactttgcccaatttatatgaaataaaataaatgcattctcaagttttgtttgctgaatgctacaagctttgcaaaacgtttttgctgctttagtctattctgcaaatactagtattgattatgtgttggagtcattatttgcctctgctaagccttctccacagtctggtggcattgctaaacaagctttgcattcgatagctcagtgtgttactattctatgccttgttgctggtgatcagaaatgttcatctacagtgaaaatgctcactgacattctcaaagatgacaacagttctaactccgtaagcttttctcttcagtgaaaatgctcatctacagtgaaaatgctcactcacattctc

SEQ ID NO: 17517 - DNA, 406 bp, Glycine max
agcttgaagtaaattcaaacgacacacaactggatctgagatttccgaatgaattccgtagtatatctagacgctcgaaattcagaacaaaagctctgagcaaattcaaacgaaaataactttttactcgtatgtccgatcgtttcccgtagtatatcgagaccctcgtaattgaaaccagaagcccgtagcaaactcaaacggcaataaattctaactcggatgtccgaatgaatcccatgatatatcgaggcgatcgtaattgaaaacagaagctatgagcaaatgcaaatgacaataactttttactcggatgtcggattgagtcccgtaatatatcgagacgctcggaattgaaaacagaagctctaagcatattctaacgacaataactttttactcggat

SEQ ID NO: 17518 - DNA, 434 bp, Glycine max
agaaactcagccgagctaagccccagagcataaaaatcttgtgttcttttgtgccaatcattacttcctgcataaaccagaccttagaaacaatagtatctttggtggtcatcaatttccaaccttgctttcctagcatgacaagattaaaaagcgtgaagatgcttgaaccccatacctccaaattctttgttcattgtcaacctctcccaatttaaccatttatacccttgctcgagtgattgttacatactaccccaccaaaaagagttcattattttttttctaattcaccctgaagagtagatggaaatagaaaaatgcttatacaataagtgggattgagtgagctactaacttaatgagaatttctttatccaccttggaaagatactcaatggaccagggatgaatacacatggaaagtctatctt

SEQ ID NO: 17519 - DNA, 408 bp, Glycine max
  unsure at all n locations
agcttgcctttccccttgatatattngagggactcatggtcactatgaatgacaaattccttgggataaaggtagtgttgccatgttttcaaagcccgtactaaggcatacaactccttatcataagttgaatagttaagggtaggaccacttaacttttcactaaaataagcaattggatggccttcttgcatcaacacagccccaatcccaacatttgaagcatcacacttaatttcaaaagatttttgaaagtttggcaacgaaagtatgggggcattagttagctnttgcttaagaacattgaaagcttcttcttgtttctctccccatttgaaaccaacatttttcttgagcacttcattgagaggtgctgccaatgtgctaanatccttcacaaatcgtcta

SEQ ID NO: 17520 - DNA, 408 bp, Glycine max
tttgcttcaagaaaaatggccttagcaaacttcttatttccagaaggaaattcaatcaatagacctccaatctttaatggagagggttaccactactggaaaacccgaatgaaaatttttattgaggcaatagacttaaatatttgggaagccatagaaatagggccttatatacccaccacagtagaaagaatcacaatagatgggagcacaacaagtgaaagcataacaatagaaaaacctagagatagatggtctgaagaggatggaagacgagtacaatacaatttaaaagccaaaaacataattacatctccctgtggaacggatgaatatttcagggtttcaaattgtaagagtgctaaggaaatgtgggacactctacaattaacacatgaaggaacaaaa

SEQ ID NO: 17521 - DNA, 386 bp, Glycine max
caagctttgatctcatttggagaggttaatgaaacaacgagatgatgcgctccatgagaggttggatcaaatggagaatagagatcataatgaagaagaaaggaggagaagagggaatgatggtgttcctagacaaaaccgaattgatggtattaaactcaacattcctccatttaaaggaaagaatgatccggaggcctacttggagtgggagatgaaaatagagcatgtattctcatgcaacaactgaggaggacaaaaaggtgaagcttgccgccacggaattttccgactatgctcttgtgtggtggaacaagctacaaaaggagagagcaagatatgaagagccaatggttgatacatggacggagatgaaaaagatcatg

SEQ ID NO: 17522 - DNA, 437 bp, Glycine max
  unsure at all n locations
ntgagaaaattcanacaacaataactntntacacggatgtctgatagagtcatgtaatatttcgagacgctcgaaattgaatacggaagctctgagcaaattcaaacgacaataactttttactcggatgtctgattgaatcccataatatatcgacaagctcgaaatagaatcttgatgctctgagcaaattcaaacgacaataactttttactcgaatgtctgattgagtcctgtaatatatcgagacgctagaaattgaatacggaagctctgagcaaattcaaatgacaataactttttactcggatgtctgattgagtcccgtaatatatcgacacgctcgaaattgaatgttgatgctctgaggaaatacaaatgacaataacttttttctcggatgtccgattgagtcccgtaatatatcgagacgctcg

SEQ ID NO: 17523 - DNA, 409 bp, Glycine max
tcatgcttaagtatgtatggaacaacttcattactgttgtttaacacatacaagagagcttatgacaaatcttctagacttggagtcattacatgcaatcctcttgaacccttaccacccactctgacatcatgctgaaacttaagaaggccaacaggtttagccttctcaatgtattctgaacaaaattcaatggcttcttctgcaatgtacctctcaacaatagatgctcctggatgatatagattattcatatacattttaaaaatcttcatgtatcgctcaactgggtacatccactgcaaataaacaagaccataacatttgatttctctgacgagatgcataatcaagtgaatcatgatgtcaaagaaggtatggggataatacatctccaactggcacagta

SEQ ID NO: 17524 - DNA, 428 bp, Glycine max
  unsure at all n locations
atactcaagcttcaagaattatggcctcatcaaactatttgntttcgtgtgaaattgtataaatagacctcctatctttaatggagtgggttaccactactggaaaacccgcatgcaaatctttatagaggcaatagatttaaatatttgggaagccatagaacaaggaccttatgttccctctataatagccggaagtgcaacaatagaaaaacttagagcagactggactgaggaagaaagaagattagtacaatataatttaaaggccaaaaatattattacatttgccctaggaatagatggatactttagggtttcaaattgtaaaagtgctaaggatatgtgggatacactacaagtaacacatgaaggcacaacagatgttaaaatatctaggataaacactttaactcgtgaatatgaac

SEQ ID NO: 17525 - DNA, 396 bp, Glycine max
  unsure at all n locations
agtttgtgaaaaccttgacacaattcatgcaagtcttcatctcaaaccataaaaccacgaaatcggcaatcaaaaatcttgaagttcaagtaggccaacttgcaaagcaacttgcggagaagtccaatgggaattttgtggctaacacagagaaaaaccacaaagagaaatctaaagtggtacttacaataagaaaaaggatggatggccttgttagtgataatttagtggaaggtgtagtaaaagatatgggtgatgcgaggaaagtgtangagagagagacatagctgagaataaagagaaacaaataagtgttgaaaatgtagaanaaaccagaaaagtggagaanaaaagaaaaacacttttaaggaaggagttgacgaggcatatcttcta

SEQ ID NO: 17526 - DNA, 290 bp, Glycine max
  unsure at all n locations
agctttgatcatctaccttatttctgacagccagtgggtgaatccagtccaagtggtccctaagatgacagacctcacaataattaagaatgatagggatgagcttatccccataagaatgcagaacagttggcgagtctgcattgattataggaggctgaaccaggtaaccaaaaaagatcatntttccctgcctttcattgatcaaatgcttgagcgcttggctggtaagtctcattaatgctttcttgatggcttttctggttatttacaaaatcatattgctcttg

SEQ ID NO: 17527 - DNA, 330 bp, Glycine max
tcaacatcagaccacttccagggtgctggaactactttacatggtcttgatggggcctatgcaagttgaaagccttggaggaaagaggtatgcctatgttgttgtggatgatttctccagatttacctgggtcaactttatcagagaaaaatcagacacctttgaagtattcaaggagttgagtctaagacttcaaagagaaaaagactgtgtgatcaagagaatcaggagtgaccatggcagagagtttgaaaacagcaagtttactggatactgcacatctgaggcatcactcatgagttctctgcagccattacaccacagcaaaat

SEQ ID NO: 17528 - DNA, 387 bp, Glycine max
ttgcatgccagctttgttcgaggatgcctacccattacccattaaatatagactagttgatagggccacaagaccctgcctacttagcttcttagatgcatactcaggggacaaccaaatacggatgcatccacaagatgaggagaaaacaaacttcataacctaggcgactaactattgctatcagattatgccattcggcctataaaaggctagctccacttaccagcacctattggacatgatattcaaagaacaaattggaaagaaaatggaggtatatgttgacaacatggtggtatagtctaatgatgcagaatcacacacctatgattttgaagaaatatttgcaaagatctgaagcctaacatgtaactcaattcgaag

SEQ ID NO: 17529 - DNA, 323 bp, Glycine max
actgggataaacttcttgaagggcttctttgtctgcttgcattccaagcaatttctacatttctcctgtggttattgtagttgaagaattccttgtgccaacttgtgcatttgagcaaaatctttgaaattcaagtgtccaagcctacagtgccaaagccattcttctttgttgctcacagcactaagacattcgtgctcaaatgcttgcgttccaattttgaaagttctatttctggtcaatggtgtttttatgattagatttctggttttgtcatataccagcatcatcatgtcctccatagttatcttaaagcctttttg

SEQ ID NO: 17530 - DNA, 360 bp, Glycine max
agtttgtcgtctcggagatgtccgactatgctcttgtgtggtggaagtgattatgcaagttgaagtggacgtttccattgggaaatacaatgataaggtactttgtgatgttgttcctatggaggccagtcacttacttttggggagaccatggcaatttgataaaagagccaatcatgacggttacaccaacaagatctctttcattacttttggtgttgcataaaaaatgtacaatgtaagtcggctaggtatttttgtgcgagctcaaccgacattttgtttcgagcgaaactggcatgttcccatttatattggccagtaaatcattagcccacctcggcataaaaatatttgcta

SEQ ID NO: 17531 - DNA, 386 bp, Glycine max
agcttgtttagaataacaagatcaaaatgcacaatttgctacgtgacatgggaagagaaattgttcgtcaaagttctctagaggaacctgagaagcgtagtcgattgtgggttcaccaagaagtgcttgatttgttgttagaacatactgtaagaactttctctacatattattttgaaacttttgatcatatgtgtttttatcatgatcacaaaactaaatttaaatcatcttgttctttttaagttatgctaatttttgtgggattcattgttcacaaaaataaatttgaatgattctgctcttttaatgtgatgcaatgttattagacccggatttattcagaccatgttgcttgcaaaccagtgttcgactgtctgaactac

SEQ ID NO: 17532 - DNA, 372 bp, Glycine max
tctatttttgcccttgcagaaattaatgttctatctaatcatgacagttcaccaggaaatcaggttactctttcatttgaagagtatactgctctgacgggcaaagctcgagatgcagaggaacaatctaagaagagagttgcaagttctatgcttgaagttgacgaaacaagtttgtcgaacatggacattttgaaaagggtagaagaagctacagaagaagttaaaactagcaagaaggcccttgaagaagctctagaaggggtagaagctgcgaatagagacaaagtagcagttgaagaggctctaaggaattggcgatctgagggtcaaaataagcgttcttctatacacaactctaccaagttcaaa

SEQ ID NO: 17533 - DNA, 311 bp, Glycine max
gcgcctgttatacttgcgaatctttctgaacacctattccaagactgtgatgtgtcgggtcatgctataagacttgacaggcatgtcatcaacatagacctcgatatttcatcctattttttgtttggagacccggtccatgaacctttggtacgtggcccctgtagtcttcaatccaaagggcataaccatgttacagaaattgatgtcttcaattatgaaggcaattctctcctcgtcaggagggtgcatcctgatctggttataccctgagtacgcgtctatgaaacttaacaactggaaacccgacg

SEQ ID NO: 17534 - DNA, 388 bp, Glycine max
  unsure at all n locations
agcttattactttattntttcggatcgtgtaatttaaaacttataattgatagcagaaaataaaatttataacttgttaaaatagaattgtttgatatatttaattattctatcagttgataaatataaaatgatataaaaatgtttatatactattgtcacataaaaatgttntttaggtaactataattttaaatatttgattcttattttttttggaaatatataatattttattaaaaataaaatatcagaaaggatattaaaatagttaaaagacctataactattaagaagagatgataaataaagtggattaaagcaagaataaaaatgaaaagaaagaataatattactaatacatgcttttaacgagttataagttaac

SEQ ID NO: 17535 - DNA, 360 bp, Glycine max
agctttacacagtttatttttctcaaacttgagttttggaagaccaattactaagtctttcctaattagatgatttaaatgattcatattaatgtgtgcagtcctacaataccacaaccatgaatcatctatcttactcaccaagcaacttagctcatgaaaaactgcatgctcaacattcagcatataaatgttacctattctcttaccaatgtggataactttatcggatatggcttcacttataagacatcaatctatgttgaattcaatcttgaaacctttatcacaaagttgactaatacttagaacggtatgctttaatccattcataattaacacatatttcatctaaggttt

SEQ ID NO: 17536 - DNA, 400 bp, Glycine max
  unsure at all n locations
agctttcacaacaaatttctaaatatgtttttgaacaaaatgaagtacgtaactaattaccactaatatatactgtgactacttagaaggaagggataggtcatgattagtccaacctaatctgcctaattaaactaattacacaaagcaaagcctaaattcgtaacccaattattcaagtgcagaggttctgacttccaatattaatttgaccctcaaaatggaaggattggcccaagcttattgatgcaatcctcccaaggaggggacccatcaccatagccatgactaggagactccaggaagattgggctagggatgcaagagaaggccctaaggttctcatgagccttangatagatnttgggcccatgggctaagtatgaacccacttatcttt

SEQ ID NO: 17537 - DNA, 362 bp, Glycine max
agcttttggtgggacatcttgacttgctttccaatctgacattcaccacagattctgccttcttctattttcagattgcgaatgcctctaacagcacctttgtcaatgagtttcttcatgcctcttaagtgcagatgtccaaatctttgatgccatattctgacttcatcttctttggaggatagacatgtggaggagtaactggtttcttgaggtgtccataggtagcagatgtcctttgatctgctgccctttattagaacttcacacttctcatttgtcactaagcattctgaccttgtgaagtttacattgaatccttcatcacacaactgactgatgctgatcaatttgcagtcagt

SEQ ID NO: 17538 - DNA, 380 bp, Glycine max
  unsure at all n locations
agctttatgcggcataattttagttgtttcttcttcctttatcttttaagatagtccatacaatcaggtctctccaatttcaagacatgttattctattaagaaattataagaactttgaatttttaaaactattcatatagacattagcaactcacattgttttaaatagaaattatgtgcgtgtttggatgaacattaatataattgattntgaatgaaattaattttataaaattgatttaaagtaatgtgatttatatttgaatgtttttaaagtatgttaggagtaaaacttaatattaaaattgtgttnttatacatatatntatgacaaatactaattacgttgnccatgatctttttatgttcacctatgtt

SEQ ID NO: 17539 - DNA, 300 bp, Glycine max
  unsure at all n locations
atgacacagncttatggtctttcctggattatatgctgcatacatcgggctcttggcataaatggagaaagtggatcccagcttgtcttcactcagcaaccatttctatccttattaatggcagccctacaaaagagttcaccccatctagaagcttgaggcaaggagaccccctaacccctttactctttaacatagttgggaaagcatttcaggcctaatgaaggaagcagtccggaagaatctctataccactacaggttgcgatgaaatatgagcccacaatattctgccaaatgc

SEQ ID NO: 17540 - DNA, 415 bp, Glycine max
  unsure at all n locations
tgggataagaaactaagaaactatgaaaaaataagacttttataatatactaaaaatatcattaatgattaaatatggtgaaataaagaaaaaaattaaaataaagtgagataaaatatttaatttgataaaatttattaacttctaaaatgatatacagatacacgtgtatttaggaatgaaaacataatatacatgttaattcataatataagaaaaagttataatattttaaaattagcataataaaaatacagacgtacacgtgtttgtatttctgctagntatatataaattaaattattaaatatanaacacattaatttttaatcaacatactctattagaataaatgatctatactggttttcaatggtaatttggtggttttgtttaaatttgttatattttctaa

SEQ ID NO: 17541 - DNA, 371 bp, Glycine max
  unsure at all n locations
cgccaaatgctctataggctgatgagttggtccatcttctctaagtccaatcgtatcatgagtcatcacataaataacttcagcttcacacagtgcataaatccttatggcagctctcatgtagtcagtgaaaacaaagggcatntaaattttgctgaaacagatttcttgtagcatatgcagggctttctggagtgtatgtctgaatgttgaaatttaattaaaagggtagtcaataatccagaaacaaatgatggaagtcaagttttatttatctttaaagttgaaggctatacatgcatgaagcanaaagatggatgatgagtgaagatgcaatgtacttaatatgaaatttactgtattaggaaagt

SEQ ID NO: 17542 - DNA, 384 bp, Glycine max
agcttatgagaaatccctgttttgtggagagataagtccttgtttggctgatttaaagcatttgaatcacttgaacttgagcggcaattatttccttggagcaggtatgtcaattccttctttccttgggacaatgacttccttgactcacctcgacctctctcttactggattcatggggaagattccatctcagattgggaatctctccaatttggtctatcttgacctcggaggttattctgtcgagcctatgttagctgacaatgtagaatgggtatcaagtatgtggaagcttgaatatcttcatttgagttatgcaaacctatccaaagcattacattggctacacactctccaatctcttccttctttgacccacct

SEQ ID NO: 17543 - DNA, 354 bp, Glycine max
  unsure at all n locations
agcttatgctgcaaacatttataatagacctgctcagctgcaaaatcaacatcagcagaataattatgacatttcaagcaacagatacaatccaggttggaggaatcatccaaatctgagatggacaagtcctccacaacaacaacaacctatccctcatttccagaatgctgctagtctaagcaagccatatgttcctcctctattacagtagcagcaacagcagcaatcacaacaaagacaacaagaaactgaggctcctcctcaaccttccttagaagagttagtgaggcaaatggccatccagaatatgcaatntcagcaagagacaagagccttcattcanagtctgac

SEQ ID NO: 17544 - DNA, 428 bp, Glycine max
  unsure at all n locations
acttcaacaatattacaaaattgatttttatatctttaaattgattaaaaatatcattttaaaataattaacaaatatggtttttgaatataaaaaacacacgctatttcaacaaatttaatataaatatttatttttacgataaatacatttaaaaattaattatgaaaagaatcaagtccatcttacacatattatctcaaaattgaataattatatattcatatttaacatatttacattcttttttaatttatatatttcatataagtattccatgactattactgcttagtaaaaaattaaattataataaatttcattaggttaagtatttttaatgataacataggtttaattacaattttaaataatcatcttctttgatntaatataatatatatatatatcattgatattttgacatg

SEQ ID NO: 17545 - DNA, 408 bp, Glycine max
  unsure at all n locations
ttgaatgctctattcaatggagttgacaagaatatcttcagactgatcaacacatgcacangggccaaggatgcatgggagatcctgaaaaccactcatgaaggaacctccaaagtgaagatgtccagattgcaactattggctacaaaattcgaaaatctgaagatgaaggaggaagagtgtattcatgacttccacatgaacattcttgaaattgccaatgcttgcactgccttgggagaaaggatgacagacgaaaagctggtgagaaagatcctcagatctttgcctaagagatttgacatgaaagtcactgcaatagaggaggcccaagacatttgcaacatgagagtagatgaactcattggttccctttcaacctttgagctaggactctcggataggact

SEQ ID NO: 17546 - DNA, 443 bp, Glycine max
  unsure at all n locations
tttcttagtcgtctgtaaagatgattaggtgttanttagcggcgatgcctactgtagactgtgtgtctcccatgtttaagttgtatgtaacttgtattttcttcacagatggggcatgcgtgatgacccttaacactgtaaccgctgagattcccatatgctggaaagtcattaatggtacaaaaaagcattgcacgcatttcaaacgtctccttgcgaaacgcatcatacactacaaccccctcgtcccacaactttctcaaatcttcaatcaacggacttagataaacatcaatgtcatttcctggctgtcttgggcccgatatcatcatagacaacatcatgtattttcgcttcatgcacaaccaatgagacaaattgtaaattactagtagaactggccatgaactgtgttgagtgcttaaggagccatatggattcat

SEQ ID NO: 17547 - DNA, 385 bp, Glycine max
  unsure at all n locations
agcttttattctagagcatcccgaaggagaaagctcacaagtcacaagtgtcttgtaagaccaaacctggaatttgcttcgagggagggagaccaagaaaaaaaaatgtttacatgtatataacatataaaaaaaggtttaatatatgatatatatttaatatttttttataaaaatatatataacaatatcaagtaaaaaacattattatctaactaattatatcatttatataaatataagaaacaaatataatatttnttcttgtaattataaaaaaagacaaacttgtatttaaatatattaattatacatttatataagagacaaatagatacaattnttatatccttaatgtattggtgaagttactaatgagataatc

SEQ ID NO: 17548 - DNA, 372 bp, Glycine max
  unsure at all n locations
agctatgaccattcgaatttctcaagagttgccgttgttcaatttcgagcgtgtagatgagttatgtccccgaatcggacatctgtgtgaaaagttatgaccattcgattttctcgagagcttccgttgttcaatttcgagcgtctcgatatattatgaccccgaatcggacatctgtgtgaaaacgtatgaccattcgattttctcgagagcttccgttgttcaatntcgagcgtctagatgagttatgtccccgaatcgaacattcgagtgaaaacttatgaccattcgaatttctcgagagcttccgttgttcaatttcgagcgtctcgatatattatgttcccgaatcgggcattcgagtgaaatgtt

SEQ ID NO: 17549 - DNA, 215 bp, Glycine max
ggtttcctgaacataggaaatcaaagcttcaacaatggggagatggaccatttcaagtgcttgaaagaatcaatgacaatgcttacaaagttgagctgcccggcgagtataatgttagttccaccttcaatgtctttgatttacctctctctgatggcagatgtagaatccgatgtgaagacaaatccttttcaagatggagagattgatgagga

SEQ ID NO: 17550 - DNA, 387 bp, Glycine max
  unsure at all n locations
ttctataatcaacgcacattctccatcctgtgtctgttctggtatgaatnagaccatttcgaacatttcttattactgccattcctcctttctttggaacaacttgaacaagactgacccatgagttgtctgagattggatagataaagcctgcctctaataacttgagcacttcttttcttacttcctccttcattataggattcaatcttctctaggttgtcgcacaggcttataatcgggcttcaaattgattttgtgcatacaatatgatggactgattcctttaagattagaaatgtgccaaccaataaccgacttacgtcatttagaatctgcactaattgatcttcttctctcttcttcaaagagttgctatttataaca

SEQ ID NO: 17551 - DNA, 385 bp, Glycine max
agcttcatgcatggatgctgagacagactcttcatcagaactttgtattggaccatctagtataatctttatcaacaactcaaacatttggacaaactcttgtgcaaatttggctagagtattctcacattctcccattccactgaaaacggcatctggatgacccaatatcatataaccacaaagaacaactctcacaggataccttgataacctaactaagctattgtttgactccctgactgaatctactttctttgcctgtcggcttctcataaaactcttggaagtagcctttttcttggggtaagcaacccatttaagaagattatcaatgttatccaagctagacaaattgttggcaggagccactgttgtagacact

SEQ ID NO: 17552 - DNA, 344 bp, Glycine max
  unsure at all n locations
ggacctataaatctcagcttgagttgtgaaaacttgattggatcttccatttntttgtgtagagttgcngggaaacagaattcaccaaaaaaaaagaaagaaaaaagcatagagagaaagatcaacatggtgttgaggaaagtgggtaaatatgagattggaaggaccgttggagagggaacgtttgcgaaggtaaagttcgctcataacacatacagtggcgagagtgttgtcatgatagtgctataccgtagcgccatcatcatacacaatatggtcgaccaggtatttgtttttttaagtactacatcacgtgaattcctgaaattacaagattcagttca

SEQ ID NO: 17553 - DNA, 375 bp, Glycine max
agcttggttatctccttcttcactacatcaagaatcactgggttgagtcttctctgtggctgtcttactggtttagctccatcctctaaatttattcgatgcatacatgtggatgggctaataccaggaatgtccgccagggtccagcctatagccttcttatgcttcttgagaactgacaacaacttctcgtcttgctcatcagcaagggaggcagatataatcactggaaaactcttgcaatcatccaagtaagcgtattttaaatttgatggcagaggcttcaattctggtgtggtcggctggacagtggtagaaggagatggtttctcagcctttacctcataaagaaagtcagaggtatgtgtacttcct

SEQ ID NO: 17554 - DNA, 393 bp, Glycine max
agcttttactaaagtattctctagtttagagtcctgcatcagtacaacccttattccaacaccaaaagcatcacattcaatatttcaaaagctttatcaaaatttgacaaacaaagcaaatgtgcattggtcaacttgtctttcaatatattaaaagttgtctcatgcacatcagtccacttgaacaccacattcttttttacaagttcgtttaaaggtgcagcaagtgaactaaagcttttcataaatcttctataaaaacttgctaaaccatgaaaagatcttacctcattagcattcttaggtacaggccattccttaatttcctttaccttttcttcatcaacacttattccttttgagctaatgaaataacctaagaacacaactgat

SEQ ID NO: 17555 - DNA, 351 bp, Glycine max
tttataataaacaagccgagccgaaccgagtcttacgtaagtcgaattgaagaccctcgacaagctgttcggctcatttccacccctacctgcaataacatagaagtgggtaaccccacaattttacttattccaattatcactgctcttttccccttgattttcacaccgggcctaagtaacaactcaatgcagcccttgggagcacaaggaacaaagaagggctttcttcctcttatgcaatttcaattctttagcaataacttaattttgtagattttttaaaaataaattcaatatttagtataattattactttttcacatgtcttttaagtactaattcatttca

SEQ ID NO: 17556 - DNA, 346 bp, Glycine max
  unsure at all n locations
tatgcatgcagcttttgggtatgactccggagaactggatgttaaacaaggagacattcttaagatgtttaagctctgtcatctcaagtggtagctcgcccgagaggttattaatgtacatatggatctgctcaaggctttgaattntccatatgccaagtggaatttctcctgtcaaatggttttcacacaatctaagatcacgcaatttactcaagtttcctaattcgcttggaattcctccttcaagttgattgtaattcaaactccactctttcagtgattcgcaattaccaatctgtggatgtattttccctgacaataggttctccggaatgaataacat

SEQ ID NO: 17557 - DNA, 350 bp, Glycine max
agctttgagacaattcattcgacaataactttgtactcggatgtctgattgagtcccgtaacatatcgagacgctcgaaattgaatgttgaagctctcagccaattcaaacgacaataactttttactcggatgtctgattgagcctcgtaatagaacgagacgctcgaaattgaatgttgaagctctgagccaattcaaacgacaacaactttttactgggatgtctgattgcgtcccgtaacatatcgagacgctcgaaattgaatgtagaagctctgagacaattcaaacgacaataaatttttactcggatgtctgattgagtctcgtaatataacgagacgctcg

SEQ ID NO: 17558 - DNA, 324 bp, Glycine max
  unsure at all n locations
ataatttnagcgtctcgtatattacggtttctatcagacatccaagtaaaaagtgagtatcgtttgaaatggctcagagcttccacattcaatttcgaacgactcgatatatgaagggactcaatcagacatccgaataaaaaggtattgtcctttgaaatggctcagagattccacattcaatttcgagcggctcaatatattacgggactcaatcagacatccgagaaaaaaattatttccgtttgcatttgctcaaaggttcaacaatcaatttcgagcgtcttgatatattaccggactctatcagacttccgagtaaaa

SEQ ID NO: 17559 - DNA, 394 bp, Glycine max
agctatgcttacaaactcttcatccccctcaacaaaagactctttcaaatcgcttctaccattataacaacaattccaaagaatattgttcatattctatttatttaataaaaattagggacattgatgtttagtcatgcatactcttagagtgatctctattatatatttgtagcaagaattatgatcatactttaggtgaaaaaaatggcatacatataatgtttgactttctaaagtcacaaagtatggaatataaataacataaccacaatcagatatatatacttaacacgtttagtataaaaaatttcaaacaagtacaataaaaacctcaactaacccaaacaatagaacataagtgtcagtaatgaagcgatcacccaagataaac

SEQ ID NO: 17560 - DNA, 445 bp, Glycine max
  unsure at all n locations
tgcaaactaagtgctcacctttagtagaggagaatttcttatgctggttcatggtaaccttttcctctagatgaccattaaggaatgtcgttttcacatccatttgatgtaactcaaaggtcaaatgagctactaatgccataattattcagaaagaatctttcttaaatacaggaaaaaaaggctctgtgtatcaattccttctctttgagtgaaccctttggccacaagtcttgccttatgtctctcaatgttgccttgtgagtctttcttgggtttaaaaacccatctacatccaatggcttttacaccactaggcaactgtacgagatcccagacttggttaaacgccataaaatcatctcatncttcatgggatatgtcaacaagttgattctttagaactcatgggcctgtgaaacgttcaggatcatttgcagctcta

SEQ ID NO: 17561 - DNA, 391 bp, Glycine max
  unsure at all n locations
agctttacatgatngattttggtgttagatttggtcaatttgaaggcaagatatgggaggagtgataaaattttcactgaattgcttgtgttgttgaagaagatgatccctaaagataacaagttgttgaatattcactatgaggtgaagaaaatactatgtcctattagtatggagtaccagaaaatacatgcatgccttaatgattggataccaaaaaatgagtttgcagaaatgcataagtgccctacatgtggggtatcgtgatacaaagtgaatgatgatgactacagtaatgatgtaagcacacacaataaccatccaacanaggtgtgttgctatcttccaataattccaatgcttaagtgattctttgctaatggagacaaca

SEQ ID NO: 17562 - DNA, 167 bp, Glycine max
gatattatgtcctgtgggtatggagtaccacaaaatacatgcttgccctaatgattgcatttcgtatgggaaatagttggctgaaatgcacaaatgccccatatgctgggtatcacgggacacaatgaaagatgatgaatgtaatgatgatgcaaccacatgctgta

SEQ ID NO: 17563 - DNA, 388 bp, Glycine max
agctttgatgcaacattttgaaaggttaatgaaacaatgagatgatgcgctccatgagaggttggatcaaatggagaatagagatcataatgaagaagaaaggaggagaagagggaatgatggtgttcctagacaaaatcaaattgatggtattaaactcaacattcctccctttaaaggaaagaatgatccggaggcctacttggagtgggagatgaaaatagagcatgttttctcatgcaacaactatgaggaggaccaaaaggtgaagcttgccgccatggagttttccgactatgctcttgtgtggtggaacaagctacaaaaggagagagcatgaaatgaagagccaatggttgatacatgggcggagatgaaaaggatcatg

SEQ ID NO: 17564 - DNA, 394 bp, Glycine max
agcttgtagggttaaagtttcatgattgccacgtgttgatgcaacaattgttagccgtggctatacgagacatcttgccaaagaaagtcaggttagccataactcgcttgtgctttttcttctatgccatatgtagcaaagtcgttgaccctgttaagtttgatgagctgaaaaatgaggccgcaattatactatgccagttggagatgtatttttcccctgatttctttgacatcatgattcacttgattgtgcatctggtcagagaaatcaaatgttgtagtcctatttatttgtggtggatgcacccggttgagcgatacatgaagatcttaaaacggtatacaaagaatatatatcgcccagaagcatctattgttgagaggtacaatgc

SEQ ID NO: 17565 - DNA, 327 bp, Glycine max
  unsure at all n locations
tataaaactcaactatgctgctatatttacatagacctcctcaacctttgctttataatcaaccacagcagaacaaatatgacctctccatccacagatacaaccctggatggaggaatcaccctaacctcagatggtccagccctcagcaacaacaacagcagtctgctccttccttccaaaatgttgctggcccaagcagaccatacattcctncaccaatccaacaacagctacaaccccacaaacagccaacagttgaggcccctccacaaccttacctcgaaaacttgtgagacaaatgactatgcagaacatgcaatttca

SEQ ID NO: 17566 - DNA, 372 bp, Glycine max
agcttatagttattggagggagaataaaacaatccaaaatcaattgtacctttcaagtaacgaagaattctttttgcgacttttagacgaggagaggtagaaacaattatgaggaagaggtagaaacaattatgaaaaagcatatgaaaggaagtatgataaatctaatgttgaatgttttaattgtcataaatatggccattactcttgggagtgtagaacaaatgttgaagagaaggtcaatcttgttgatgataaagaagaagttgaagagtcaacactactactatcacttaataatggtgagaaggaagacaaatgcttatggtatcttgacaatggagcaagcaatcacatgtgtggatgcaaaga

SEQ ID NO: 17567 - DNA, 385 bp, Glycine max
  unsure at all n locations
aaccttctatgaatcttcggtaatatcctgctaagtccaaaaaactcctaatctcaaaaatagacttaagactctcccacttcagaacaacttctatcttaaaagggtctacaactatacccccttgagatatcatatgccctatgaaactaactttctctaaccaaaattcacacttggacaacttaacataaagctgttggttcctaagggtatgcggcacaatccttaagtgctcttcgtgctcttcatgttcttcatgttcctctctaacctgacctanagtctatcttgctaaacacacaagctcctaccagctggtccagaaggtcatctattctangcanagggtacttattctttattcgtcaccttattcaactga

SEQ ID NO: 17568 - DNA, 378 bp, Glycine max
  unsure at all n locations
agcttggctattgcatatcttgccaccaagccacctaaagagtgacctacaaatgaaattttctgaacacttgggtgacgttttataactgatataacctgngaaaaaagaagaagaaaacaagtatcctttatttttctggatttgatgctacagagttgaagtcaattgaacatcttaagagccaaaagattagtatctaacaaaggctaaaattaaagtatgactaagttttagacttaggattagtctcataatcacttcaaagatcctaattacagtggttacaaaaaagaacaagttaaaagtcaaagccataacacacctcctctgctagtctatctcccattacatcaacaccatcaaatgtcaacatgg

SEQ ID NO: 17569 - DNA, 378 bp, Glycine max
  unsure at all n locations
agcttgcagtacaacatttcaattgttgacaagtaacttaaaaaagagaaatatgacaaccctttttctacttaaaaagaaatgacatgcatcagcaatgaaacaacgtagcaaacttacatggtaccaggccaatgtacaacagatatgttgaagtttctctgttcctcctgataaaacactgtattggagaatcacgaggaccangctattcatgcacaaaagagaaacataacataagaaacagaataccctaaagggaaaaaaagataaaagattaggcaacacaagaggtgaagaatttatcacctgcttcaatgaaatgggaaatgtgagccttncacattgttcaggagtcttaacaatctctttcgtaac

SEQ ID NO: 17570 - DNA, 424 bp, Glycine max
ctataaaactcagcttgaggtacacctggatctctgtttgttctattgtgctgattatataccgcgtttggacaacgaacaggctttgaaaatagtgcgtagcacacaacactatgaacacagggaaaggcattgtcctgaggaccctcctacttgccttgtgccaatccctaaaggttacaaaacacccatcgagtggcctagcagcagagataaggacattctttattttaatttatcggcaaatgttaattgttatggggaaaaattaaacttaccatctttcccttggttcttcttttgcactaagccaccttatagttataactcacatgtacacacacttagtcggccttttatatatttcaggctaataatttgctggccggttaaaaaacatatggaccacacgtacacacaactg

SEQ ID NO: 17571 - DNA, 433 bp, Glycine max
  unsure at all n locations
taatggccatggtgattgagaaggagacatacattattggaatgcaaatcatgcttccattttgctttttagacatgactcttgcttcaataacatggtttgctagtcttgtaaccaccaacctagtaccattgcataacccttgtgattgatacatgttccttaaaagcattattggggtacccacctttagttntatcttatgattaggaagaccaaatgttctcaaactattgagaaattcacttgtgaccacttcaagtgcatttcattcaaccatttttgacttgtcaattgaataagaacttagatattccctttgatcacctgaaaacaattcattaataaaaacattgtagaatcaatattaattattaaatcaattgattatttgtgagatacctggattaaagaaaaacataatcttatttga

SEQ ID NO: 17572 - DNA, 419 bp, Glycine max
ctcagctaacaatccttgtgatctattatggaatatttctatccctatcacatagcttacctcatccatatctttcacttcaaagtttctagagagaaatttcttagtctcatgaagaagaccaagatcgttagttgcaagcaagatatcatccatatacagaattagaaaataaccttactcccactgaccttcagatacatataccgataaatagtattttccttaaatctaaaggaaacaatggtatcattaaacctcaaataccattggcgggaagtttgctttaagactgtatatggatttctttagtttgcacaccatgtgttcctttcctttcactgagaaccccattggttggtccatataaacattatcttcctaatcttcatttagaaaggcagttttcacatccatct

SEQ ID NO: 17573 - DNA, 367 bp, Glycine max
  unsure at all n locations
taatgaaggcgttatcagatatgtactagaagccgttgatagccaacaaagtatacttgatgcgtcggttgttcaaccttaagatgggagaaggtatctctataactaatcatattaatgaatttaatactattcttgcccagttgaagtcggtgcagatcaaatttgaggatgaggtgaaggcattgattctattgtcatcactatcggatagttgggttgcaactgttactgcagttagtagttctacaagagagaacacattanagcttagtgacattcgtgacttgatcttaagtgaagatgttcgcaagagagatttangagaatcttctagtcatgtttccaatttagcattgaatactga

SEQ ID NO: 17574 - DNA, 450 bp, Glycine max
  unsure at all n locations
tgaaagtgtgtaaccaaccattntctcattgtataactaccggaacgtgtatactatcattgtgatcatctttttctctgtcattgaaggtgccacttgagctgtcaagtccctccacctctgggcgtattccttgaatgactcatgctcttttttacacatgttttgtagttgcgttctatccggagccgtatcataattgtactgatattgcctaacgaaggcaaccattangtccttccaagaatagactcgggaaggttccaagttagtgtcataccctaatttcgtccggggattattacttgacgacatgcaacctttgattggtccgttcaagatacttggcaccctttgttgcacaatatgtaagtcttgagacgcaccggaagtcaaaggaagcanggttatgcgatccgtgaaattccgtaatgtggcggaaaccaaaag

SEQ ID NO: 17575 - DNA, 363 bp, Glycine max
agcttccgttttcaatttggagcatctctcgataaattacaacactctgtcgggcatccgagtaaaaagttattgtcgtttgaattttctaagagtttccattttcaattttgagcgtctcgatatattacgcgactcaaccggacatccgtgtataaagttattgtcatttcaatttgctcagagcttctagtctcaattttgagcgtctcgatatattacccgattcaatcggacatccgagtaaaaagttattgttgtttgaatttgctacgagcttcccttttctacttggagcgtctcgatatattacgttactcaatcggacaaccgtgtataaatttattgacgtttgaatatgct

SEQ ID NO: 17576 - DNA, 387 bp, Glycine max
  unsure at all n locations
tgtagcanattcaaacgaaaataactntntactcggctgtccgattgagttcggtaatatatcgagacacttgaaattgaaaacgaaaactcgtagcaagtgcctaccgcaatcacttttaaatcgtcgcgaaataaattgacatgctccaatttgaaaaagaaagttcatagcaaattcaaacgacaataactttttacacggatgtccgattgagtcccgtaatatatcgggatgctccaaattgaaaacggaagcccctagcanattcaaacgacaataactttttactcagatgtccgacagaggttcgtaatatattgagacactgcannatgaaaacagaagctcgaatcanattcaaacgacaatatcntttttactcga

SEQ ID NO: 17577 - DNA, 376 bp, Glycine max
agctttgatgcaacatttggagaggttaatgaaacaacgagatgatgcgctccatgagaggttggatcaaatggagaatagagatcataatgaagaagaaaggaggagaagagggaatgatggtgttcctagacaaaaccgaattgatggtattaaactcaacattcctccatttaaaggaaagaatgatccggaggcctacgttgagtgggagatgaaaatagagcatgttttctcatgcaacaactatgaggaggaccagaaggtgaagcttgccgccacggagttttccgactatgctcttgtgtggtggaacaagctacaaaaggagagagcaagaaatgaagagccaatggttgatacatggacggagatg

SEQ ID NO: 17578 - DNA, 371 bp, Glycine max
  unsure at all n locations
agctttgagccaattcaaacgacaataactttttactcggatatctgattgagtcccgtaatataacgagacgctcgaaattgaatgttgaagctccgagccaattcaaacgacaataactttttactcggatgtctgattgagtcccgtaatatatcgagacgctcgaaattgaatgttgaatctctgaccaaattcaaacgacaatagctttttactgggatgtctgattgagtcccataacatatcgagacgctcgaaattgaatgttgaacctctgagccaattcaaacgacaataacgttttactcggatgtctgattgagtcccgtaatatatcgagacgctcganattgatgttgacctctgag

SEQ ID NO: 17579 - DNA, 392 bp, Glycine max
  unsure at all n locations
taaacattcactttcgagcctctcatatattacggttactcaatcaaacatccgagaaaaaagttattgtcggttgaatttgctcaaaggttcaacattcaatttcgagtgtctcgatatattacgggactcaatccgatatccgagtaaaacgttattgtcgtttgaatttgctcaaaggttcaacattcaatttcgagcgtctcgatatattacgggactcaatcagacatccgagtaaaaagttattgtcgtttgaattggctcaaaggttcaacattcaatttcgagcgtctcgatatgttacgagactcaatcagacatccgagtaaaaagctattgtcttttgaaattgctcagagattcaacantcaatttcgagggtctcgata

SEQ ID NO: 17580 - DNA, 379 bp, Glycine max
  unsure at all n locations
caatagacctccaatctttaatggagagggttaccactactggaaaacccgtatgcaaatttttatcgaggcaatagatctaaatatctgggaagccattgaaatagggccttatatacccaccacagtagaaagagtttcaatagatggtagttcatcaagtgaaagcataaccatagaaaaacctagagatagatggtctgaagaggatagaanacgagtacaatacaacctataagccaaaaacataataacatctgccctaggaatggatgaatatttcagagtttcaaattgcaagagtgctaaggaaatgtgggacactcttcgattaacacatgaacgaactacagatgttaaaagatctacgataaatgca

SEQ ID NO: 17581 - DNA, 335 bp, Glycine max
tcaagctgtttctcggatgctgcgatggttagtgggagtgatgctcttgcgaacattacatcgaaagtttatctgtctcccaagctttggtatttgagggttaatgtgatagaggcacacgacctgatgccaactgataagggtagataccctgaggtatctgtgaaggctatcctggggaatcaggccttgaggactagaatctctcaaagcacgagtattaatccaatgtggaatgaggatctgatgtttgtggtggccgaacagtctgaggagccgctgattttgagtgtggaggatagaagtgcgcctaacaacgatgaaatgttggggag

SEQ ID NO: 17582 - DNA, 317 bp, Glycine max
tttcatgtatgctttgcagaccaagccctccttgacgaagctacggacttttttgagatcctattgatccccctatgtgaaacattactcgatccattcgtttggggatgaaagggtgatgctacttttcctcgcacatgatagcgctggacgacatttgagagatgatcgtacacaaatgtgtacctgcatcgactaatccagagtctaggctctccacacctagacgatatgtctctctgtaagagcttaatcaccatcgttgcatgacaggcgggctaccaggtgcttccacccactatgagacatagtccact

SEQ ID NO: 17583 - DNA, 353 bp, Glycine max
  unsure at all n locations
ttgcattctagcttatgcattcttatcatcatgtcaacctcatcttcactcaaatctcccctcttaatatttggtattagatagttcagccatctcaatctacgactcttgcggcatctgttcaaccctatacgtataccagacgcatattaatgtttattatttattacaacttatgaggatatatgtcatagctattatatatatatatatatatatatatatatcattgcgagtcacaagcatattccagataacgaaaagagaacatatacaaatataaacacatgcatatattaatattatgggtcttgctaatcataatatctattgtataaatgatngaaaagtat

SEQ ID NO: 17584 - DNA, 392 bp, Glycine max
agcttctgtgcctgatgctgagaaagatgttccaacatcttccaccccgaatgtttctgtgcctgatgttgagaaagatgttccaacatcttccggcccaaatgctgaagccctcccttcacccagtgaagaggaatcaacagaagaagaggatcaagcctcaaaggagactcctgcaccacgggcaccagaacctgctccaggtgacctcattgacctggaagaagtagaatctgatgaagaacccattgccaacaggttggcacctggcattgcggaaagacttcaaaacagatagggaaaaacccctcttaagaggtctggaagaatcaagactatggcacagaagaagagtactccaatcactcctgccacagccagaagaagcaagg

SEQ ID NO: 17585 - DNA, 392 bp, Glycine max
  unsure at all n locations
caccggatagntcattctttataagtgcttaagtggaattagagtatcgtatgtataatgttngaataatactctgtgattatacttccaaatattcagaactctgcttggttatgattatcaggcaagcaaaggatgttgttaaaggcataaagaagcggattggaagtaaaaattcaaaagtccaacttcttgcactaactgtaagcaaaatagtcttgcgatacaaccttttttctctttaaactctgatgtcagtattgctctagattcttttggactcaagcatgtttgctgtaattgcatttttcaaatttcattttggcctcccaaacttcacattgttgactcgntcatttttgaatggttttgttgaatgacgacgatgttta

SEQ ID NO: 17586 - DNA, 362 bp, Glycine max
aatgtttttccattgattgggaaagctgttcccgaaattcctgaaaaatgtaaagatccaggtacattcagcataccttgtattatagggaatagtaagttcgagaatgccatgctagatttacgagcttctgttagtgttatgcctctgtctattggtaattctctatctctaggtcccttgcagtcaactgatgtgataattcatttagctaatagaagtgctgcctatcctgttggtttcatagaagatgtcttagctagagttggtgaactgatcttccctcgtgatatttatattgtgaatatggaagatggattttctcaaggatcagatcccatgattctaggcagaccctttat

SEQ ID NO: 17587 - DNA, 378 bp, Glycine max
tcaagctttttattgtttcttggatggctatttgaagtataattagatagcagtggaccctaacgaccaagaaaaaattgcttttacatgcccttttggtgtctttgcttacagaacgatgtcatttccttgccaccttttagagatgcatgctagctatttttgttgatatggtagaaaaatgcattgagtgttcgtatataatttttcagtcttcgatccctccttcaactgttgcctaaccaatttggaattggtgctatgacgatgtgtagagactaatctagtgctaaactgggagaaatgtcattttatggttcaagaaggcgatattttgggaaataagatatctcctagagggactgtagtagacttggc

SEQ ID NO: 17588 - DNA, 368 bp, Glycine max
atcttgaaggtaaaatagatgccttggttaacctggtaacccaactggccatgaataaaaaatctgcacctgtcgtcagactctgtggtttatgctcctctgccgaccaccacacagacctttgcccttttgtgcaacaatctgaaccaattgaacagcctgaagcttatgctgcaaacatctacaatagacctcctcaacctcagcagcaaaatcagccacaacagaacaattatgacctctccagcaacaggtacaatcccaagtggaggaatcatcccaaccttagatggttgaatccttcacaacaacagcaacaacaacaacaaccttattttagaatgttgctggcccagcagacatacgtt

SEQ ID NO: 17589 - DNA, 417 bp, Glycine max
  unsure at all n locations
tgccgccacggagtnttccgactatgctcttatgtggtgtaacaagcttcaaaaggagagagcaagaaatgaagagccaatggttgatacatggacggagatgaaaaagatcatgaagaagcggtatgtgccggctagttactcaagggacttgaaattcaagctccaaaaactaacccaaggcaacaagggggttgaggagtatttcaaggaaatggatgtgctcatgattcaagcaaatattgaagaagatgaggaagtaactatggctcgatttcttaatggtttgactaatgatatccgtgatattgttgagctgcaggagtttgttgaaatggatgatttgcttcacaaagcaatccaagtggagcaacaattaaaaaggaagggagtggctaagaggagttttaccaactt

SEQ ID NO: 17590 - DNA, 377 bp, Glycine max
agctttcttcttcaaaagctctgcaatttcagaattcaatttttgatccacttgcaacagcctgtctaatgcaagaaaagcagctgtgacccattttggaacctgttctttctccctgttaccaagactagaatcccattggtagagtagatctgaggcaatttttatgaaaccactctttgaagcagcttctcgcgcaacagcatcctcattaagaatcaatgcaagaacatgaaatagagcagcaagcatggtattatttccgttaccagaaatcaatccacattccttgatccggtcaacaataaaagtgagaacattagatctattttgaccatcattctgagagcatatcatcatgagcaagtcacggacag

SEQ ID NO: 17591 - DNA, 429 bp, Glycine max
  unsure at all n locations
gcagggaattggtgatttgaaagcacctggtattgttggttatggttcaaaatttttcaaaaatagctggcatatagtaaagaaagattttattgctgcagtgaatgaatttttcgagaaaggatctttattaaaggattttaatactactcttgtgactctcattcctaaatctattactgctaagactgtcaaggattacaggcctattgcagtttgctctactttttataaagtgatctaaaattttttgactaggaggctagggatagtgatacaggatattgttcatactagccaagcaacttttgtacccggtcaagtcattcacaatcatattctccttgcaactgagttgatgaaggggtataccagaaagggtgggacccctacgtgtatgatgcanatagacctccaaaaagcttatga

SEQ ID NO: 17592 - DNA, 381 bp, Glycine max
  unsure at all n locations
tcaagtttgtggaacatcgatagggtgtgggtatagggggacacgttgaattgcacccgccagtcatgggaacaaccgtcgctacccatcatgcggcggaggtgcttgctagtgcggagggcctgtgccatgccttgcgccattgactgaatgttatggtcgggtatggtggtgtacgccactgtgtcttggttcccctgtgactttccatgccgcattaatattcttctctttggaagcacaccaaccatatcttctcttctctttacattcattttctttcaccctcacaattctaatcttttttatccacacataaaattntgacaataaaagaatatttatacactttcctttgcgcatgatggttgattcctatat

SEQ ID NO: 17593 - DNA, 450 bp, Glycine max
  unsure at all n locations
atacaatacttaagcttgtgtcgcactgtctactgctgaagctaaatatatagctgcaggaagttgttgtgctcaaagtctctggatgaagcaacaacttgaagactttggagtaaaccttgatcacattcctctaaaatgtgacaacacaagtgcgatcaacctaaaaaaaaaccttgtcatgcattctaggactaaacacatagagataaggcattattttcttagaaatcatgtgttaaaaggtgattgttgtattgagttcattgatagtgagcatcaactagcagatattttcactaaacctcttgctagagataggttctttttcattagaaatgaactaggcatattagatgcatctagcatagaatgatattttgtttgcacagtgtgtgtgattgacattgctactcatataatttctttntgtttagtttgtgtcacaag

SEQ ID NO: 17594 - DNA, 386 bp, Glycine max
agctaatgcttaactatgtatgacaaaactgcattactgttgttcaagacatacaagtgagcttgtaacaaatcttctacacttggagtgatcacctgcagtcctcttgaacccttaccacccactttgtcataatgccgagactcatgaagcccaacaggtttagccttctctaagtattctgaacaaaattcaatggcttcttctgcaatgtacctctcaacaatagatgcttctagacgatatagattctttgtatacccttttaagatcttcatgtatcgctcaactgggtacatccaccgttgataaacaggaccacaacatttgatttctctgaccagatgcacaatcaagtgaatcatgatgtcaacgaaagcaggggg

SEQ ID NO: 17595 - DNA, 399 bp, Glycine max
  unsure at all n locations
tattatagttctttatttattgaggatcataaaaagtttaagtcatgtatgagagacataacaacttccttcttgaacaaaagttgagagaggaaatgttgataaaactcttttcattaaaaagtcctctcataacattttacttgtgcaagtttatatggatgacatcatttttggttccactaacaaatctctttgtgaagattttgtgcacaagatgtagggggagtttgaaatgttaatgatgtgggagttaaattactttcttggtctccaagtgaagctagtggaccatggaacatttctctatgaagtaaaatactacaaggaacttttcanacagtttgagatggacnatagcaaggaggctacaactcatatagctactaattgctacct

SEQ ID NO: 17596 - DNA, 379 bp, Glycine max
agcttctagattttcgatatgaaaacatgtagtttcatgttctcttcaattaacgcataatacattttactactttctagtgttgcataccaagattactcaaatatcaccttaggactcccacaaaaatttagtttaggacaataaaaaaataaacttaagcatacatgataaattgtaatataactattttgcaacaataagtcgtatgatgatagtaggatgtcatcgacatataatacaaaaataataaatttactctcattgaacttttagtacacacaatcatcaaccaaatttatctcaacaccataagagataatctagatgaatttttaataccatagacgagagacttgtttaaagcataaatgaattt

SEQ ID NO: 17597 - DNA, 388 bp, Glycine max
  unsure at all n locations
agcttaaaggagaagttggttttctgaactctaaactggaaaacatgacaaaatcaataaagatgctgaataaaggctcagatacgcttgatgaggtgctacagcttggaaagaatgttggaaaccagagaggacttggatttaatcctaagtctgctggcagaacaaccatgacagaatttgttcctgccaaaaacagcactggagccacgatgtcacaacatcggtctcgacatcatggaacgcagcagaaaaggagcaaaagaaagaagtggaggtgtcactactgtggcaagtatggtcacataaagcccttttgctatcatttacatggccatccacatcatggaactcanagtagcagcagtggaaggaagatgatgtgggt

SEQ ID NO: 17598 - DNA, 443 bp, Glycine max
  unsure at all n locations
ctatacaatactctagctntactatgcanagaataaccaaggaaaattccttcatttgacttagctttaaattttcctaagttttctttttcattgtttaatacaaaacacttgcaaccaaaaacatgaagatgcgagatgtttggtttcctaccattgaacacttcatatgaagttttctttaagatgggtcttattaaagccctattcatgatataacatgcagtattaacggcttcagcccgaaaatattttggaagaggagtatcattcaataaggttctagcaatttcttccaaagacctatttgtcctttcaataactccattttgttgaggggttcttggtgcataaaagatatgttcaatgccatgcttatcacaaaataaatcaaattctttattttcaaactcacccccatgatcactcctaatagatataat

SEQ ID NO: 17599 - DNA, 385 bp, Glycine max
agctttaaattgtagttaagactgcagacaacttctgttcatgtttgaagtttgatagaaacacagatgttagctatagtaatatgaggaaggctgcttcatgagaagatttgactgacaactatttattctatccaaaagctgtagatcttcagtacaaggatttaaggcattttcagtggcattgggaaaagggggagcctgtaattgtcagcaatgtgcttgaatgtacatctggtttaagctgggaatcgcttgacatgtggcgtgcattacgtcatgtaactaataccaagcatggccaacatttggcggagaaaacaattgattgcttagattggactgaggcttgcttaatttcccaatctttaactctattgaccat

SEQ ID NO: 17600 - DNA, 420 bp, Glycine max
  unsure at all n locations
tttctactttgcagggcaggacactatgntcagnanngtcgtgctcggacaaagatattattgagtaggtaccctgattggcaagcacgcgcaagggaggaagtctcacaagttgttggcaaccaaaaaccgacttttgatggactgaatcaattaaagaatgtaagtttgtattataaacttgttattgaatagcatgttcatggtatttactatgaatatttttgcaacaggttactatgattttgtatgaggttcttagattataccctccaggagttggtgttcctcgaaaagttatcaaagatgtgaaacttggaaacctatcatttcctgatggagtggagattttcatatcaacaattctggttcaccatgatagtgagctctggggtgatgatgctaaggagttcaaacctg

SEQ ID NO: 17601 - DNA, 413 bp, Glycine max
gctgaacattgactgaatctagttctttagtttttagtcaaaatatctgctggttgatcattggaactaatgaactcaatgacaatctccttggacaatagtttctcccgaatgaaatgacaatcaatctctatgtgtttagttctctcatgaaaaacaagatttgaagcaatgtgaagagcagcctgattatcacaatataacttcatttgtccaatttcacaaaatctcaactcttggagaagttgcttaacccacataagctcacatgtaaccatagccatagatcgatattcagcttctgcactggatcgagcaacaaccgtttgcttcttgctttttcaagaaataatattccctctaatgaagacataataatttgatgtggctctcctatccatgggacagtcagt

SEQ ID NO: 17602 - DNA, 375 bp, Glycine max
agcttcaacattcaattttgagcgtctcgatatatgacgagactcaatcagacatccgagtaaaaagttattttcgttttaattggctcagaggttcaacattcaatttcgagcgtctcgctatattacgggactcaatctaacatccgagtaaaaagttattgtcgtttgaattggctcagggcttcaacattcaattttgagcgtctcgatatatgacgagactcaatcagacatccgcgtaaaaagttattgtcgtttgaattggctcagaggttaaacattcaatttcgagcgtctcgatatgttacgggactcaatcagacgtccgagtaaaaagctattgtcgtttgaatttgctcagagattcaacat

SEQ ID NO: 17603 - DNA, 398 bp, Glycine max
  unsure at all n locations
ttgagccaattcaaacgacaataactttttactcggttatctgattgagtcccgtaatataacgagaccctcgaaattgaatgttgaagctcttagcaaattcaaacgtcaataagtatttactcggatgtctgattgtgtcccgtcatatatcgagacactcgaaattgaatgttgaagctctgagccaattcaaacgacaataaatttttacccagatgtctgattgagtcccgtaatatatcgagactctcgaaattgaatgttgaacctctgagccaattcaaacgacaataactntttactcggatgtctgattgagtcccataacatatcgagacgctcgaaattgaatgttgaatctctgagccaattctaacgacaataactttttactc

SEQ ID NO: 17604 - DNA, 385 bp, Glycine max
  unsure at all n locations
agcttttcgttcggcatanctatatcagccaaatctatttcaggtgtattgtttggagcacagaagctatattagacatttgcgtacaagagctgacaagcaagatgtcacagtagatatatgtccactttgggccagaggagttcgcctagttcctgatcaagatccaaacataacttgggagaatcatgtcaacaccgagtgcgacccatcgaattacgagaaagtcacacagaagaaaaaatgccctgtccctgaatgcagagagatattagtattctcagacacaattaagtgcaaggactgcacagtagagcattgtttaaagcatcggtttggacctgatcataaatgtcctggtcccatacatgtggaatcaagtttt

SEQ ID NO: 17605 - DNA, 415 bp, Glycine max
ttcttggtttcagctgctgaagatgaattcgtggctatttcatgcactcctctaatgactatagcatcatttctggcactaaactgttgggagttggaagccatcttctcaattaaatttttggcttcagcaggggtcatgtctccaagggctccaccactggcagcatctatcatacttttgtccatgttactgagtccttcataaaaatattatagaagaagctgctccgaaatctgatggtgagggcaactggcacatagttttttaaatctctcctagtattcatataggctctctccactgagttgtctaatacctgaaatatcctttttgatggttgtggtcctggaagcacggaaatgttttttctaagagtcctctcttgaggtcatcctaactcgtgatggacctt

SEQ ID NO: 17606 - DNA, 389 bp, Glycine max
agttatacaaatcacatttagccccttttcaatttaagacttctcaattttgggcactaagattgttcaatgaggataatatcgattgcgtttcattcttgtgtgcagttggtgacttgaaccatctgatctcagctacaatgtctggtgtcacttgttgattgaagttccctgttcaacttaactctgatctgcgatagcttgcagtgaaccttattcccttccctcgcctccacttcttcatggatggatatgctcctttgacatctcgtggctctcagcaatacatggccttgagtgttcctgagctgacacagcagatgtgggattcaaagaacatgatgtgtgctgctgaccctcaacatggccgctaccttactgcctcatcc

SEQ ID NO: 17607 - DNA, 328 bp, Glycine max
agcttaaacattcaatttcgagcgtctcgttatattacgggactcaatcagacatccgagtaaaaacttattgtcgtatgaattggcttaaagcttaaacattcaactttgagcgtctcgatatattacaggactcaatcctacatccgagtaaaaagttattgccgcttgaattggctcagaggttcaaaattcaattgcgagcgtctcgatatatttcgggactcaatcatacatccgagtaaaaagttattgccgtttgaattggctcataggttcaacattcaatttcgagcgtctcgatatatgtggggtctcgatccgacat

SEQ ID NO: 17608 - DNA, 397 bp, Glycine max
  unsure at all n locations
ttctaacgataataactttntactcggatgtccgattgagtctcgtaatatatcgacacgctcgaaattgaatgttgaagctctaagcctattcaaacaacaataacgttttactcggaagtccgattcagtgacgtaatatatcgggacgctcgaaattgaatgttgaacctctgagccaactcagacgacaataactttttactcggatgtctgattgagtcccgtattatatcgagacgctcgaaattgaatgttgaacctttgagccaattcaaacgacaataactttttactcggatgtctgattgagtcccataatatatcgagacgcttgaattgaatgttgaacctctgagccaagtcaaggagaataactttttacttggatgtccga

SEQ ID NO: 17609 - DNA, 376 bp, Glycine max
agtttgaccaggaattacttgtatgggttggatgttgaattctggttgttcctggtgcggagatgatggtacagcgggtgaaccagaagcggaagtttcttttggtgaggtagccatggaaaagcagagcgtttggaatgatttcgtaaatctcagaaggctattgggaaatgctggtataaacacgaatgccaagcagatataaatttgaatgaggaatgtagagggtcgtgtgaagcaacggtcgaattttccttggttcagtagtgaacgtgctattaatgttaagtgattcgtttgggcacgttcagattgctgtagttgctataattcctctagcacacaaatgcccagcttgcccctcatgttttcatac

SEQ ID NO: 17610 - DNA, 393 bp, Glycine max
agctctggatcaagtgtacctttggtgcaatactgtactgtcctttgtgctcttgaggagtttctataaactagaggcaattggcttgttttcttgcccttgtataatgatgaccctttgaaaacctttccattcccaagcttcacttgtgttggaaagcttatgtctgtgtagctagcagcaacagtcatgatccatggagcaacatttccagcagttgaactagaggggcctgaattgcctgctgagcaagaaacaaaaactcctttatgcgttgctccgaacgaggctatggcgatgctgtcattgtaataaggtcttgcaatgccacctaatgagagtgacaacacatcaacaccatcagcaacagctcgatcgatagcagccaatatg

SEQ ID NO: 17611 - DNA, 423 bp, Glycine max
  unsure at all n locations
gcttggagtctatataaacttgtgagaatttcatagattcgactcgtgaactcaacttatagactcgtaagagtctacttcatataaaattaataataaaatatttataaatgatttatcaattaaatatttcaacaatataataaagtaaaatagtaaatcataaatttcataatacttaaataatcaaatctagtaatgcatcactattaaataataacttgcatatattatagtaatggtaaatcatttccattgatgatttgatgttattagagaacaagagttttattttattaaaggtagaattttttttattcgagaacaacacaataaatgaaaatatgttgatcactaaatagacagaaaataacccanaatgacttatatttcggtttaatttttttaacttattaactcgcc

SEQ ID NO: 17612 - DNA, 376 bp, Glycine max
  unsure at all n locations
agctctaagcaaattcaaacgacaataactttttactcggatgtctgattgagtcccgtaatatatcaagacgctcgaaattgaatgttgaacctatgagccaattcaaacgacaataactatttaatcggatgtctgattgagtcccgtaatatatcgagacgctcgaaattgaatgttgaagctttaggcaaattcaaacgacaataactttatactcggatgtctaattgagtcccgtaatatatcgagacgctcgaaattgaatgttgaacctatgagccaattcaaacgacaataacttgttactcggatgtctgattgagtcccataatatatcgagacgctcganattgaatgttgaacctctgaacca

SEQ ID NO: 17613 - DNA, 367 bp, Glycine max
ttcctcatgtgtacccaaaccttatcacctggttcaagcacgactttctttctgcttttgttggcttgccttgcatatctcgcattttttttttcaatttgagccttcacttgctcatgctacttcttcatatactcagctttaacctgagcatccttatgcttaatcatagcaatgttcggcactatcttctaatcaagaggagtcaaatgcattgatgcatacactatctcaaatggcgaacaattaattgtgctatggacagcccgattatatcaaactcaacatgaggcaaacaagcgttccaagatttaagattttcctttaatacactcctaagaggtgtgcctaaagttctattgactac

SEQ ID NO: 17614 - DNA, 393 bp, Glycine max
tgcatgatttacatctccctctttctcaagcaaattcttcttgatatcatcaaaattcttcatgatttacattgaatgtgaatgtatgtatacatgattttgatgatgtcaaagaagaatctaacaaggctgcttcaaatgataagcatttgcttcaagaataattcaagattgcttcaacaaacaaagccttgtttcaagattcactaaagaccaagccttgccttaaaacaaagtgctttcaagacatgcaaggctctggtaatcgattaccaggaagtgtaatcgattaccagaagacagggttgagaaatagctgttgaaaaaggttttgaatttgaattttcaacatgtaatggattaccatatgtctgtaatcgattaccagcaacg

SEQ ID NO: 17615 - DNA, 393 bp, Glycine max
  unsure at all n locations
agcttagctacacatacctctctaatagctaagctcacctccttgagatgagaagctagagcttagctacacaccccctataatagctaagctcaccccatgagaaaaaacatgaaaataacaaaaaaaagtccttattacaaagacagctcataatgccccgaaatacaaggctaaaaccctatactactagaatggccaaaatacaaggcctagacgaaggaaaaacctattctaatatttacaaagataagcgggctcatacttagcccatgggctcgaaatctaccctaaggctcatgagaaccctanggcctttccttggatctctagcccaatctacttggagtcttctagccaatgcccttacggggtaggattgcatcaagtagc

SEQ ID NO: 17616 - DNA, 420 bp, Glycine max
tatcttcacaaacaaatcaaaatgaattttgtgatcttcaaaacctagctccagcttcctcttccccatatcaactatacagcttgcggtcaacacgaatggccttcccaatattacagggatgttagtatcttcggagatatccattaccacaaagtctgtcgggaagataaaatgttttactctgaccaaaacatcttcaattactccatatggcttggtaatggagtagtcagctaattgtaaagtcattcgagtgggcattatttccaactctcccaatcttctgcacatgtagagtgacatcaaattgatactgactcccaggtcaataagagcttttcccacattgacttctccaattgaacaaggaatagttacactctgaggattattatgcttgggtggaaggatcttcta

SEQ ID NO: 17617 - DNA, 418 bp, Glycine max
  unsure at all n locations
tagcccaagaggggatggacctttntgatgcaatcctatgccgcaagggcattggatagaagaccccaagtagaatgggccaaagatgcaagagaaggccctagggttcttatgagccttagggtagattttgggcccatgggctaagtacgagcccacttatctttgtaaatattagattaaggtttcattatttttgggccttgtatttagggctccataatgtaggtagggtaccctagaaatataggatttttcagcccttgtattttagggcacctagactagtttttgtattaggggtagttttgtaatttcacatgcactaagtggatatttgatgtgtgtgggtggaaataaatttaattgaattggcagaagcccaatccaattaaattttagagagggaggtgagcat

SEQ ID NO: 17618 - DNA, 384 bp, Glycine max
  unsure at all n locations
agcttatgctaaaaacatttataatagacctcctcagcagcaaaaccaacaacaatagaataattatgacctctcaagcaatagatacaatccaggttggaggaatcatacaaatctgagatggacaagtcctccacaacaacaacaacctatccctccatttcagaatgctgctggtccaagcaagccatatgttcctcctccaatacatcagcagcaacgacaatagtcataacaaagacaacaagcaactgaggttcctcctgaaccttccttagatgagttagtgagacaaatgaccatccagaatatgcaatttcagcaagagacaagagcctncattcagagtctgacaaatcagatggggcagatgactacttagat

SEQ ID NO: 17619 - DNA, 383 bp, Glycine max
cgagataatatgaagtttgtgattttagaacctatctccagcttactctttcccatatcaactatacagcttgcggtcaacacgaatggcctttccaatattacagggatggtaatatcttcggagatatccattaccacacagtctgtcgggaagataacatgttctactctgaccaaaacatcttcaattactccatatggcttggtaatggagtagtgcgctaattcgtaagtcattcgagtgggcattatctcctactttgagcatcttctgcacatggtgagagacatctaatagatactgactcctaaggcaataaaagctgttcccccttgacttctccatatgaacaacgagtactaagactctgaggattatta

SEQ ID NO: 17620 - DNA, 381 bp, Glycine max
agtttgcactatccagtgatggaatgaatccatatggcaatttaagcacttaacacaattcatggccaattctactagtaatttacaattttcctccttggttgtgcatgcagtgaaaatacatgatgttgtcgatgatgatatcaggcccaagacagccaggaaatgacattgatgtttatctaagtccgttgattgaaggcctgagaaagctgtgggacgagggggttttagtgtttgatgggtttcagaatgagacttttctaatgcatgcaatgcttttttgtacaattaatgactttccagcatataggaatttgagcagttacagtgttaagggtcatcatgcatgccccatctgtgaagaagacacaagctaca

SEQ ID NO: 17621 - DNA, 402 bp, Glycine max
caccttctaaactttatacaagaattaagctctgataccacttgttagacaagtggcctcagatatcttaagaaggggggattgaattaagatattccaaactacttgccctaattaaaaatctatttcactttttattcaagttatgaattcccttaatgacaatcttcttaaatattaattcaaataacacaatttgaatatgaatataaagcaataataaataaaggagattaagggaagagaaaatgcaaactcagttttatactggttcggccacacccttgtgcctacgtccagtccccaagcaacccgcttgagagttccactatcttgtaaattccttttacaagtgtctaaacacgcaaggacaatccttcctttgtgtgtagaattccttta

SEQ ID NO: 17622 - DNA, 404 bp, Glycine max
actcccgcttgtcggcgtacctgaagatgctattacgctcggccctttttcattttctttagctggggaggctgagagatggttgcattcattcaagggcaacagtggaaagacctgggatgaagttgatgacaagttcctaaaaaaatatttcccacagtctataaaaatattttgagtgaggcattacaaagatttcgtatcttgctgtggaaaactcccactcatggtttttcagagcctatacagttggacatcttcattgatgggttacgactgcagtcaaagcatatactcgacacttctgcaggaagaaaaattaagttgaaaacacctgaacaagccatgtaaaccttatcttacttgacacttattaaattgccaacaggatgcgtgctatctta

SEQ ID NO: 17623 - DNA, 368 bp, Glycine max
agtttgaggaggctagttttttggtggagagtgaattgaacatgaagatagatttgaaagagcaattttggatattggcaaggaggaatgagtcatttctaagacaaaaatctagatctagatggttagtggaaggagacaacaactcaatattcttccatggtactattaattggaggagaaggaaaaatctacataggggtctacatattgatgggatttaggaggtggatcctaagaaagtaaaatgggaggtgaagaatttctttcaaaaaatattcttggtggaggatttggatcggccaaagcttgatgggacaagattaaaacatatctctcaacaacaatatgagagtttcatcgcaaga

SEQ ID NO: 17624 - DNA, 363 bp, Glycine max
gctcttgctgcctaagtgtggaccctctagggctatttccattctcctcttttttcggagcctcatgaatgtcattgcctaacactgttcatgtgtcctccaccttcgagtctggagccccgcgaatgtcatcgcctaacactgatcgccaattctccattccccactatcattcggagccccatgaatgtcattgcctagcgctgttcatgtgtcctccaccttcaagtttggagctatgcttcatgattgcctaaatgtggaccctcaagtgcaatcctccattctccacttttttcggagccccatgaatgtcattgcctaccgctattcatgtgtcctccaccttcgagtacggagccc

SEQ ID NO: 17625 - DNA, 415 bp, Glycine max
taaacattcaattccgagcgtctcgatatattacggtactcaatcaaacatccgagaaaaaagttattgtcgtttgaatttgctcagaggttcaacgttcaatttcgagcgtctcgatatattacgggactcaatcagaaatccgagtaaaaagttattgtcgtttgaattggcacagagcttgaacattcaagttcgagcgtctcaatatatgacggaactcaatcagacatccgagtaaaacattattgtcgtttgaattggctcataggttgaacattcaatttcgagcgtctcgatatattacgggactcaattagacatccgagtaaaaagttattgtcctttgaattggatcagaggttatccattcaatttggagcgtctcgatatattacgggactcaatcagacat

SEQ ID NO: 17626 - DNA, 399 bp, Glycine max
  unsure at all n locations
agcttgtagtgcagctccagatttcataattggctcaccaacaggatgatagtcacagcctgcttcaaggatttgcttaccagatgacagtaaagttggaactttgtcatgacgaacctgcttctgattctcttttaactcaaaatcattagcataaggaagattagtatgtccattaaaataaccattgtttattgcggaagcgtcaagaagtgggttaaagaactgaaaaataaaaccagctgccaaacttgaacggtaagtggtttttgaggtatcatctttaggtacaatagtggctgtaaccaagatgacagcatcgtatagaatgctagcacttaaaagctntccagctaanaactcctcaacatattttgctctgattgcatgcttactccg

SEQ ID NO: 17627 - DNA, 382 bp, Glycine max
agctttgcataccccaaggatccattaggaaattacttatgaaagagagccatgagggtgggctcatgggccactttgggatagacaagacccttgtcttactcaaagaaaagttttattggccccatatgaagaaagatgtccataagcattgcactaggtgtgtggcttgtttacaagccaagtctagggtgatgcctcatgggctatacacacccttacccatcccctctgtaccttgggtagacattagtatggactttgtccttgggcttcctagaacccaaagaggtgtagactctatctttgtggtggtggataggtttagcaagatggcacacgttataccatgccataaggtggatgatgcttcccacatctc

SEQ ID NO: 17628 - DNA, 400 bp, Glycine max
tcgtcgtcctgaggatgctttttttcaaagaaacgattgcacatgtaatggtggcattcttccacattattggggatttggagtagaatcacgaggaacaacctcaaaaattcctgatccttttgctatagaacaaggtaacccaacaaaaattaaaaatggatatgaggagaaatggttgctcaacatcatggtcattgatacacgtggtgcacaagataagaaagcttgcactcaatgtagatgtgaccagatgaatctcccgaaggacttttataatgtcacaagggatatacataaccaaaaattgactacaaattataaaggaggtctattttgttgtcaggacaacttacaatgcaagcaaatagaaggttttcaaggttcaaggagaatggtt

SEQ ID NO: 17629 - DNA, 224 bp, Glycine max
caacacatgcacagtggccaaggatgcatgggagatcctgaaaaccactcatgaaggaacctccaaagtgaagatgtccagattgcaactattggccacaaaattcgaaaatctgaagatgaaggaggaagaatgtattcatgacttccacatgaacattcttgaaattgccaatgcttgcactgccttgggagaaaggatgacagatgaaaagctggtgagaa

SEQ ID NO: 17630 - DNA, 384 bp, Glycine max
agcttgacattaatatttatttcttttctggaggccatcaattgtttataatgagagtaacttacactattctatatcttctttgttggagttggtgggtcgaaactaaattaaagaataatagtggtctcaaaatatatattattatgcacaaaaaagaccaaactaaacgtgcaggtaaaggttgagtttaattatcataaagtgtttatatatagttggcctttgttggtcgattttgccagtgtcatataaactagtattaaggagctagaggcaatgggaaagagcaatgttctcgttgagggtggaactgggtatgttgggatgaaaatattgaatgcaagtttattacatggccatgaaacctatgttcttcaacgt

SEQ ID NO: 17631 - DNA, 374 bp, Glycine max
ctgaccaaaccccagcagcagttgtttccttagagacttgcctcagcaccttatctccgagactgaggataattgcactatgtgccttctacagtaatgctttcttatccccatcacccatcatcttttcaagtttggcttctccatcaagtgcttccaccaggccctgctgaacaagaagagttctcatcttcaatcgccatagcccgaaatcattttgccctgtgaatttttcaacctcatacttggctgagcccatttcttgaatcgaactcaaaattgctctatgctcaccgcaccaatttgttgtgccaagatcagattataattcacaaaagaatgagtttcttgtatgaacaagaataagcaaaatg

SEQ ID NO: 17632 - DNA, 414 bp, Glycine max
cttgagacattgtcattagtgaaaaccacgtagtcgtttcctaactgacttttaaaattaccataataatgacttttggtacatagtgatgaccaaatatttggtcgtcacttttcattgataatcttgtagaggatgcacttgaattactcattgttgtatataaatttattttaaacagaaaacgaaaaaaaatatattcaagagtttatattttttataagtaacaaaattactaaagaatatcttttatctaaaaagtatatttgaatggtaatttaactgttactgtctatttacttttcataaattatatatgataatattttccatagaagttaaagaacgactatattatcattatttaaatatttatcatagagaataaaaaatgtttcacataatttctaatga

SEQ ID NO: 17633 - DNA, 394 bp, Glycine max
tctgccttttctatttctgtgacctgaactgtatttgtcttcttctctttatccagatccttaaactgcagtgattgtctgtagtcacttgtggcagtgacgaacactacaagcaatatgcttgcaacaataccaattccatcctgtgcacccttgggccacccttccattattataccaaccaccaaagagaccaaggcacagacagcaagtatcatgagggttgtatcttgaagggattcccatacataaacccaaaatccacgggctggactttcagcgaatttattaactccataaatttcttttctctgattcaccaagtgctcagatgttgatataccatcatcaactgaggtattgagtttgtttgtgatagcatcaaccccaccat

SEQ ID NO: 17634 - DNA, 381 bp, Glycine max
atcttataatatatcgatacgctcgaaattaaacatcgaaaactctcgtgaaattcaaatggtcataacttttcacacggatgtccgattcaggcaaatcacatatcgagtcgctcaaaactgaacaacggaagctcttgagaaattcaaatggtcataacttttcacacggatgttagattaaggcgcatcacatataaagacgctcgaaaatgaacaacggtagctctcgagaaattcaaatggtcatcacttttcacactgaggtccgattcaggcttataatatattgatatgctcgaaattaaacatcggaagctctcgagatattcaaatggtcataatttttcacatggatgtccgattcgagcgcataatatg

SEQ ID NO: 17635 - DNA, 403 bp, Glycine max
tgaatcggacatccgtgtgaaaagttatgaccatttgaatttctcaagagcttccgttgttcaatttcgagcctctcgacatattatgcgcccgaatcggacatcggtgttaaaagtcatgatcatttgaatttctcgagagtttccgatgtttaatttcgagcgtattgatatattgtaaccctgaatcggacctgagtgtgacaagttatgaccatttgaatttgacgagagcttccgttgttcaatttcgaatatcactatatgtgatgcgcctaaatcggacatccgtatgaaaagttatgaccatttgaatttctcaacagctgtcgttggacaattctgagtgtctcgatatgtgatttgcctgaattggacatgcgtgtgaaaagtatgaccattt

SEQ ID NO: 17636 - DNA, 435 bp, Glycine max
  unsure at all n locations
tcaacgttcattntcgagcgtctcgataagtttctgtattctatcagacatccgagaaaaaaggtgttgtcgtttgaattagctcagaagttcaacattcaatttcgagcgtctcgatatgttacgggactcaatcagacatccgagtaaaaagtcattgtcgtttgtattggctcagagcttcaacattcaatttcgagcgtctcgatatattacgagcctcaatcagacatccgagtaaaaatttatggtcgtttgtattggctccgagcttcaacgttcattttcgagcgtctcgattagttacgggactcaatcagacatccgagagaaaagttattgtcggttgaattagctcagacgttcaacattcaatttcgagcgtcttgatatgttacgggacttaatcagacattcgagtaaaaagtattgtcg

SEQ ID NO: 17637 - DNA, 422 bp, Glycine max
ttcaacattcaacttcgagcgtctcgttatattttgtgtttctattagacatccgagtaaaaaggtattgttgtttgaatttgctcaaagcttcaacattcaatttcgagcgtctccatatattacgggactcaatcagacatccgagtaaaaagttattgtcgtttgaatttgctcaaagcttcaacattcaaattcgagcgtctcgttatattataggactcagtcagacatccgagtaaaaagttattgacgtttgaatttgctcagagcttcaacattcaatttcgagcgtgtcgctatattacgggactatatcagacatccgagtaaaaagttattgtcgtttgaatttgctcagagcttcaacattcaatttcgagcgtctccatatattacgggactcaatcagacatccgagt

SEQ ID NO: 17638 - DNA, 383 bp, Glycine max
tgttgacaaagctgaaaagtgtgtctttgttgttgtttgtgaaacatcaaaagcatataagttatttaatccactaacaaagaagattgtgaccagcagggatgttatttttgatgaagacaacacatgggactggaatgagcagcaacccaattcaattattgttgacaatgaagatgtaaaagaactacagctactcgtaaacattgtcttaacatctccaaatgaagctcaaatagctcctgagacagagatttcaacaccaacaaatgctggaacaacagatgcaactagacatggcaatggggcgggtcgggtacaggtattgtctccccaatcccttaccccgacgcctcgacatattcccatacccgtacccgata

SEQ ID NO: 17639 - DNA, 436 bp, Glycine max
  unsure at all n locations
tcataagtccatcctattatttaatcttcaggtcttctaagataattttcaaccaaattaattcacaaataccttgtgccatagttttaaactcagattcagcactagattgaaccacaacattctgttttttaactctccaaattactaagtttcctcaagaaaggtgcaatatccagtagtggatctcctattagttactgaccctgcatagtcaggcatttgtaagcttcaaggattgtattaacatttcctttatataaaattcctcttcctagtgttcccttgattgcaaaatcctataagtgccatgtaagtgaacttctcttggacaatgcataaatttgctaaccaaacttgtagtgaatgcagtatctggccttgtgtgagagtcagacaagatatntaatttcccaaccaaacattgatacatctc

SEQ ID NO: 17640 - DNA, 431 bp, Glycine max
  unsure at all n locations
tcggcattctagtccaagcgtctcgatatattacgagactgtatcagacatccgagtaaaaagttattgtaatttgaatttgttcagagcttcaatattcaaattcgagcgtctcgatatattacgggactcaatcagacatccgagtaaaaagttattgtcgtttgaattggatcagagcttcggtattcaatttcgagggtctcgatatattgcaggactcaatcagacatacgagtaaaaagttattgtcgtttgaatttgctcagagcttcggaattccattttgagagtctcgatatattacgggactcaatcagacatccgagtgaaaagatattgtcgtttgaatntgctcaaagcttcggaattccatttcgagcgtctcgatatattacgggacttaatcagacatccgagtaaaaagttat

SEQ ID NO: 17641 - DNA, 425 bp, Glycine max
  unsure at all n locations
tgacaataactntatacacggttttcttattgagtcccgtaatatatcgagacactccaaattgaaaacggaagctcttataaaattcaaacgacaataaatttttactcggatgtccgacagagggccgtattatatcgagacgcttcaaattgaaataagaagcacgtagcaaattcgaacaacaataagttttcacttggatgtccgattgagtcccgtaataaatcaagacgctcgaaattgagaacagaagctcttggcaatttcaaacgacaataactttatagtcgaatgtcctattgagtcccgtaatatatcgagatgctccanattgaanatggaagctcgtaacaaattcaaacgacaataacattatacacggatgtccgactgagtcctcgtatatatcgagacgctctaaa

SEQ ID NO: 17642 - DNA, 436 bp, Glycine max
tcctccatatattattcgcctgaatcggacttccgttttatttgttatgaccatttgaatttctcgagagcattcgttgttcaatttcgagggtgtcgatgtattatgcgcctgaaccggacttccgtgtaacaagttatgaccatatgaatttctcaagagctttcgttgttcaatttcaagcgtctagatatagtttgcgcctgaatcggacttccgtgtgacaatttatgactatttgaatttctcgagagcattcgtggttcaattgcaaccttctcgctatataacgcgcctaaatcggacttccgtttgaaaatttatgaccattcgaatttctcgagagcattcgttgttcaatttcgagcgtctcgatgtattatgcgcttgaatctgacttccgtgtgacaatttcttaccattagagtttcttgat

SEQ ID NO: 17643 - DNA, 394 bp, Glycine max
gctgaatattgcctagaggacttggttgattatgtcgttggtaaagaggcttatgatgggcctttacttcctttagcaaatggcaattttgcatctttttcagaagcatcaaaaggagtctcttatttcatttgtgatgaatttgaatataagctgatgcagccagtttctgatagagtaattgatcagaacattcctcccaatatattgaacaaactcactggtattgcgatgtcctcaaagaccaatgttattctttgtagtattcaccattttgctcagctattccctgcatttatgtcagctgactggaaatataggagtaaaagtgttctgggaccctgaatcttgtcgaaagccaacgtcatcatggtttctgctattctggcaatat

SEQ ID NO: 17644 - DNA, 423 bp, Glycine max
  unsure at all n locations
tgaaattgacaacggaagctctcagaaattttaatgtcataacttttcacttggaggtgcaattcatgtgcataatatatcgagacgctcaaaattgaacgaggaaagctctcgagaaattcaaatggtcataacttttcacacggaggtcagattcaggcgcataatatatcgagatgctcgaaattgaacaatggaagctcctgagaaattcaaatggtcttaacttttcactcggaggtccgattcaggcgcataatatatcgagacgctcgaaattgaacaatggaagctcttgagcaattcaaatggtcttaacttttcacatggaggtccgattcatgcgcataatatatcgagacgctcgaaattgaacaatggaagctcttgagcaattcanatggtcataacttttcacatgga

SEQ ID NO: 17645 - DNA, 370 bp, Glycine max
  unsure at all n locations
taaaaagcaaagtagtaagatacattgttaatgaaacgtataataaagaataatggcctcncaaacttctaatgctgatggttttctgtttggttatccaacaacatttggatccatggtttctcaatttaaagcatttttagaagacactataagcctgttgtggcttacacaggcactagcaggaaaacctgtagggttcttctctagcactagttctcaaggaggtggacaagaagagaccccatgagttatattaattattactgaattcttcaatattcatgattaaggtttccatcaattaatggttattttgtatatatccactcaacatgcgagaagtcagatcaaactattagtcactact

SEQ ID NO: 17646 - DNA, 435 bp, Glycine max
  unsure at all n locations
actaagctccggagtttccagtgccaatncgtcttcttctttagtccattcttcttctggcttcaattcttcagtgggctttccttctgtgtccagcatcttgggatgttcccagcctttgatgacagctttccaagttctgctatccagtgatttgaggaaggccaccattcttgctttccaatattcatagttgcttccatcgagaataggtggtctgttcactggtccgccttctttctccatgttcatcagaatttatctccctagatctcactctgtgatttcgagtgttggctctgataccaattgaaattctgataccaagggacagatgtcgtacaggatgtcacgacatcacgcttcagaacatgcagattatatgtgtgcgtatgaacagattaaacaagtgaataacacacgagaattgttacc

SEQ ID NO: 17647 - DNA, 430 bp, Glycine max
  unsure at all n locations
tgtgaactatctttgaattcactaaatgtatatagaaatctagtttacttcctagttttatgttcttgtgaaaatcaaaagcatatattgtgacatgcatttgactatacatgtcatattttatgtcatattttaagtggtgcagaagacgaggaataagaatggaagggagaaagatggtaacattttatgctaatgattcaaatttaacgtgagacttaatataaaatttaaattacttttagaatcaaaatgattataaatgataaaatttaggaaccaaaatataaaaaagtaattcaattcgataactaaatttaggttgtgatgtcataagtcctaaaaaataaacaataaaaaatcaactttcattntagtcatggattgtcatgtattcaaacaacatttcacataaatacgaacattaacc

SEQ ID NO: 17648 - DNA, 428 bp, Glycine max
aagaagattcccaaagaagatagagcttagctacacttacctctctaatagctaaggtcacctccttgagatgagaagctagagcttagctatacaccccctataataactaagctcacccccatgaaaaatacatgaaaatacaaaaaaaaatccctactacaaagactactcaaaatgcctcgaaatacaaggctaaaaccctatactactagaatggcgaaaatacaaggcccaaacgatggaaaaacctattctaatatttacaaagataagcgggctcatacttagcccatgggctcgaaatcaaccctaaggctcatgagaaccgtagggccttcccttggatctctgacccaatctacttggagtcttctatccaatgcccttgcgggtaggattgcatcagtgtctcccctcccctcttc

SEQ ID NO: 17649 - DNA, 430 bp, Glycine max
  unsure at all n locations
tctaaactntatacaagaatgaagctctggtaccacttgttggaaaagtggcctcatatatcttaagaaggaggggttgaattaagatattacaaattatttccccaattaaaaattgtatttaactttctattcaagttattaattcccttaataatgaatttcttaaatattgattcaaatagaacaatttgaatatgaatataaaacaataataaataaaggagtttaagggaagagaaagtgcaaactcatatttatactggttcggccacacccttgtgcctacgttcagtccccaagcaacccgcttgagagttccactatcttgtaaattccttttacaagttctaaacacacaaggacaatccttcctttgtgttntgaattctttcacaacaagagaccctcggtctcttaatcccttttc

SEQ ID NO: 17650 - DNA, 421 bp, Glycine max
tcattaagagacttcctcaagaggcttctttgttaatctagatccttatctacccacacccttctattaactaaattaacctccctgaaaataattacggataaaaaataacataacaaataatcaaacatcaaacataattactaataatatatagatatatatatatatgagggtgttacattggttcctaagttgtggttctttattgttggaggtttgaaaacaaaaggtaaaagaaactatggttgaaactagccaaaataaacactaaaagaggtgtgaaagataaggtaaaaaactaatcggtaaaaggaaagctatctaagcggtttgacagtggaaggtaaaggaaataagctacgaaagtaagcaagaaatgtaaactatgcgaatcctaagagtgtgtggatgaccacat

SEQ ID NO: 17651 - DNA, 441 bp, Glycine max
tctccttccttttcctataaataggggaaggagggaataacataaaggttcaacccttctggtatctgagattcacttaaaattagtgagaaaaattgtttccgttgttagtgcttagctctactgagctttaaaagattggctaagattttgttaaaacataagcacttagacaatgaaggaaagctggagttgctgcacatgatgtccaacgttatgtcaaagaataagatcgggctgcacaatgcacaaggcaagatgaaatgtcaaatgaagaattgaagctgcatgattcacgatgtcggatacaatgtccaggacatcctgcccgaaaatactggagttgctaaaagcattgaagctgcaggatccacgatgtcggatacaatgtccaggacatcctgcccgaaaatactggagttgctaaaagcattgaagctg

SEQ ID NO: 17652 - DNA, 416 bp, Glycine max
ctgatgatagaggatgcacgaacagagcttgcaatctattttggggctccggactcaatggtggaggatggatgaacgacaatcaattcgtggggctccgaataagatttgatgatggaggatgcatgaacagcgctaggcaatcaattcatggggcaccgtactcaatggttgaggatgcatgaacgacaatcaattcaaggggcttcgaataagctttgatgatagaggatgcacgaacagagtttgccaatcaattcgtggggctacggactgaatggtggaggatgcatgaacgacaatcaattcatggggctgcgaataagatggtggaggatgcacaaacaacattatgcaatcaattcgtgggtctctagactcaatggtggaggatgcatacacgacaatcaattcat

SEQ ID NO: 17653 - DNA, 433 bp, Glycine max
  unsure at all n locations
tgtccaaaatctcactaatattaggcaactgtatctggatggtgtaagtatctcagttgcaggacatgaatggtgcagcgctttatcgtcgatgcttgacctgcaagaaattcgcatgtccaagtgcaatctctcgggacccctggattcttccctggcaagacttgagaatctatcagtcattgttcttgatatgaactatctatcatccccagtgccagaaacatttgcccatttgaaaaatctcaccatcctacgcctttctgagtgcagattgactgggacatttccacagaagatcttcagcattgaaacattgtctgttattgacatatcactcaaccaaaatctcaatggtttctttccaaacttcccattgagcagatcacttcagaccttanaagtaagaaacacaagctnttctggagcattt

SEQ ID NO: 17654 - DNA, 430 bp, Glycine max
  unsure at all n locations
tctattattgttgcagtatacaaatggaagcttatatctataaaatacaaggcatccttgccttatattagcagaggacaaaacagaaaaataacagaaaaacttccatatggatttaggtcatagcccaacacatagggacctcaagcctgagaactttctctttgatactgttgaggagggtgctaaggtcaaaactactgattttgggctctccgtgttttataacccaggtttggttgctctctcgttagatttgttttttgtggaagatgccgagggagagggcttggtcgtgggttttggtggaggtggngattctgatgatgtctttgagttttccttggcggaggagctcgccgatgcagtcgcttggcagtggagccaatgccgaggaccatgccggacttgacatactcgatgaccttgt

SEQ ID NO: 17655 - DNA, 435 bp, Glycine max
  unsure at all n locations
tgagagatcttcttcaacaatggaataccaaatcacatccccaagtgaccaccaatattccacaggctatgtgaccaaaaagtcccctcctccacctgtggagtttcctacctcaccacaactcatatttggggaggagattcttcacttcagccaccctcagcaccctctctcaatggtggatctccctgacctgttcaattgtgtggggtgcaaagagtatggctctggaaagaggtttgtttgccagcaatgtgattttcagctgcatgacttctgtgccttggctcctcctgctctcaaggcacacccctttcactcacaacactctgtcttgttccattccaaaccaggtaaaccacgtacatacatacatatatatatattcatgagtacaattgtacaaatgtaatnttttatttaaatattatatta

SEQ ID NO: 17656 - DNA, 419 bp, Glycine max
  unsure at all n locations
tcaattggagtcttgtcttttacagacttagttggacatctgttgagtatgtaagcagcagtgtagactgcttcagcccaaaatgtgttaagtagtcccttctccttgagcatcgatctagctatttccataactgtgcgattctttctctcggacactccattttgttgaggagaatatgagactgtaagttgtcgctaaatgccttcatcctcacaaaatctttcaaactcgcgagaggtgtactctntgtcgtgatcacttcttagtacttttatccgttttccactttgatttttagcaagggccttgaactttntgaatactccaaagacttctgattttttcttttagaaaatatacccatgccattctagagaagtcatcaatgaagagtatgaagtacccgttgttctcat

SEQ ID NO: 17657 - DNA, 353 bp, Glycine max
agcttttgagcttttcatatggtcatagcttttcactcggatgtccgattcaggcgcataatatatcgagacgttcgaaattgaacaatggaagctcttgagcaattcaaatgatcataactttttactaagatgtccgatgcaggcacataatatatcgagacgctcgttattgaacaacggatagctctcgagaaattcaaatggtcataactttccacacggatgtcagattcaggcgcataatatatcgagacgctcgaaattgaacaacggaagctctcgagaaatataaatggacataacttttactcggatgtccgattcacgcgcattatatatttagacgctcg

SEQ ID NO: 17658 - DNA, 413 bp, Glycine max
tccattgttaaatttcgagcgtctcgatatcttatgctcctgtttctgacctccgtgtgaaaagttatgaccatttgaatttctcgagagcttccgttgttcaattttgagtgtcttgatatattatacgcctgaatcggacctccgagtgaaacattatgaccatttaaatttctcgagagcttccgttgttcaatttcgagcgtctctatatgtgatgtgcctaaatctgacctccgtgagaaaagttatgaccatttgaatttctcgagagcttccgttgttcaatttcgagcgtctcgatatcttatgcgcctgaatcagacctccgagtgagaagttatgaccatttgaatatctcaagatcttccattgttcaatttcgagcatctcgatatgttatgcgcctgaat

SEQ ID NO: 17659 - DNA, 325 bp, Glycine max
agtttgaatctgacatccgtgtgaaaagttgtgaccatgtgaatttctcaagagcttccgttgtttaattgcgatcctatcgacatattatgcacccgagtcggacatccgggggaaaagtcatgatcattcgaatttcctcaaagtttccgatggataacttcgagcgtatcgatatattattaccctggatttgacctcagtctgaaaagttatgaccatatgaatttgacgagagctgtcgatgatcaatttcgaatatcactgtatgtgatgcgcctgaattggacattcgagataaatgttatgaccatgtgaatttttc

SEQ ID NO: 17660 - DNA, 345 bp, Glycine max
agctttagttttcaattaccagcgtctcgatatattacgggagtcaatcagacatccgaattgaaagttattgtcatttgactgttcatagagcttccgttttcaattatgagcgtctcgatatcctacgagactcaatcggagatccgtgtcaaaagttattgtcgtttgaatttgctaagagcttctgttttcaattacaagcgtctcgatatattacgagactatatcggacatccgagtcaaaagttattgtcggttgacttttcttacagcttccgttttcaattttgagcgtctcgatctattacagggttcaatcggacatccgagttaaaagttatt

SEQ ID NO: 17661 - DNA, 352 bp, Glycine max
  unsure at all n locations
ntgagcanattcaaacgacaataactttcgaatcggttgttcttatgtgtcccataggatatcaagacgctcggaattgaaaacggaagctcttagaaaaatcaaatgacagtaacttttaactcgaatgtccgattgagccctttaatatatctagacgctcgaaatttagaacagaagctctatgataagtcaaatgacagggactttcaattctgatgtctgattgagtcccgtaatatatcgagacgctcgtaattgaaaactgaagatctgagcgaattcaaacgacaataacttgtgactcggatgttcaattgcgacccgtatgatagcgagacgctcgtaattg

SEQ ID NO: 17662 - DNA, 361 bp, Glycine max
agtttacatatattccccatgtgataatctgaacaagagagaattatgggaagcactaagccagctaagacaccaagatcctgagggattatggtgcttcttcggagattttaacagcattagacaccagtccgagagagaaggggtggctcacaggggtatggaagcaaacaacataactgattttagtgaatggctagccgacctagaggtagaagaaatacctagtgtggggagaagattcacatggtttaatccaaacgggactgcaaagagtaaactagatagaatttttgtctctcatgaatggctcaacaaatggccaggctgcacccaattcatcttggatcggaacttctcg

SEQ ID NO: 17663 - DNA, 374 bp, Glycine max
agcttgtagggttaaagtctcacgattgtcacgtgctcatgcaacaattgttagccgtggctatacgagacatctttccaaacaaagtcaggttagcgataactcgcctgtgctttttcttccatgctatatttagcaaagtcattgatccagtcatgtttgttgagttggaaaatgaggccacaattatactgtgccagttggagatgtattttccccctgctttctttgacatcatgattcacttgattgtgcatctggtcagagaaatcaaatgttgtggtcctgtttatctacagaggatgtacccggttgagcgatacatgaagatcttaaaagggtatacaaagaatctatatcgtccataagcatct

SEQ ID NO: 17664 - DNA, 365 bp, Glycine max
agcttgtccttgactcattttctccttgaagtgacgtctccaatcacctttcctccttctccattctgctgccattgatcttcaagaagcaaaggatttcattgatgaagaagatccaaggcctacaagctctacatggagctacatcatgtggtatcaagagcatcttcatctaagtgatgttcttttgcttcctctatcttttgcttggtcaattcactttaattccttgttcttcatcatattctccatgtatctcctccattatcttgtgggttggttctgatcatagtagattcaaaaatataaatcgattaaatcctagatctatacttgttcttgcatttctatggctcaaattttat

SEQ ID NO: 17665 - DNA, 363 bp, Glycine max
  unsure at all n locations
agcttgagatgcttaataataacattctaggactgcaacacggtacgctttttgatgagaagcttcatgataacataccatgagagggatgtttctctacacttggagcatatagaggaactgtggaagatcttgggttgcaaagagatcccttcaaggcttttcattacagggaggtacattggaggagctgatgaagttgtcggattgcatgagatggggtggcttggaaagcttttggaaggaacaccaatggactttgctgatggtccttgcaaaggttgtgcctgcatgaggttntccatttgttccaatcgtaatggtagttgcaaagagtttaccaccaatggtgacaacacgaat

SEQ ID NO: 17666 - DNA, 396 bp, Glycine max
tctattgctcttattcatctttacttgggctatctcataccttttattttttttgtctaagattttgcatacacctccttcaaagtgaagtgtgtagcctctctccatcatttggccaatgcttagaagattttcttttaggctgggaactagtaagacatcatgaatgagtcgcgtacctttatctgtctccaccatgacagtgcctttgccttttgattcaaccacacttccatttcccagtcgaactttgactttgacagactcatcaatgcttttgaaaatagtctcatccttggccatgtgattgctacatccactatccaagtaccagcttcctcccttttcttttattgagtcttgagtggcatagaacatacattgttcttgatcatg

SEQ ID NO: 17667 - DNA, 415 bp, Glycine max
tctatagaaggttcgttcctaattgctctactattgtatcacctctcaatgagatagtgaagaagaatgtggcatttacctggggtgaaaaacaagagcaagcctttgctttgctcaaagaaaagcttactaaggcacttgttctagctcttcctgacttttctaaaacttttgagctagaatgtgatgcttctggagtgggagttggagctgttttgttgcaaggtgggcaccctattgcttattttagtgaaaaacttcatggtgcgacccttaactactccacctatgataaagagctttatgccttaataagagcactcagaacttgggaacattaccttgtttccaaggaatttgtcattcatagtgatcatcaatcacttaagttcattagagtgcatagcaagttaaa

SEQ ID NO: 17668 - DNA, 354 bp, Glycine max
agcttgatttatactggttcggccacttgccgcgcctacgttcagtcctcaagcaacccacttgagattttccactctctttgtaaaactccttttacaaagtctgaaccacacagggacaacccttcccttgagttcaggaatcctctacaacaagagacccacgatctcttaatcccttttcagaaataagaagaagaaatctctcttaaaagagatagattgtacaatgaagatcaataaaaattccttattgaatatgcaagtggttgaccaaggaatctttttgagaggataaaactattgggcaatgaaaactctctttaaattcgtgtttccaagtcacctttgatg

SEQ ID NO: 17669 - DNA, 406 bp, Glycine max
tcaaaaggagccataccaatactggcttggttgctattgttgtaagtaaactcaatcaatggcagacaatccatccagctaccttgttgctctataatacacgcccgaagtagatcttccaaagtctgaatagttcgttcagtctgaccatctgtttgaggatgataagctgaactaagcttcagctttgtccccaaggcttcatgtagacttgtccaaaatcgcgaagtgaacctcggatccctgtctgatacaatactagaaggaattccatgcaaccttactacttccttgatgtacaactccactagcttctccattctatacttcatattcactggaataaaatgagcagatttggtgagtcgatctactatgacccacacagcatcgtgtccacgactag

SEQ ID NO: 17670 - DNA, 433 bp, Glycine max
gaccttagaaactaagcttacaagggctttgacatttggagtaggcatcaagattagacctagcatccactatatcatgagtcacaccagctttacaagcttacacatgcttttgcttaacaagttcaacaacgagcaaaccactggctgcactcaaattataaccaccagcaaacccatctccttgaacaccattcctaaccattgcactgaaaagattcaccgcttccacctcctaaccatgggacccataacctgaaataatcgaattccacagcacagcacacggttcaaccttactatcaaaaccactttttgcctccctcattctggcagcattggcataaccagatatcatagctgacaaagagaactcatccacattcgttacaaaactcacaatgcgagcagcacttttcaaatcaccacactt

SEQ ID NO: 17671 - DNA, 372 bp, Glycine max
agcttttgaattttatctgtttaagcgtcccatgttaatgcgagctaattctattatgccatagccatggatcattatctttgctaagacaacattgactattacctaaattttgacttaagtctatcatgtaaacattattgactctaaaccctatatgctttatattcgtatcatgtccatgttcaatgacacattgttgagaaccaaatgataccagatagccgttgtcacacacttgactaacactaagcatgttgtgcttaagacctccaactagtagatcattttcaatggaggttgaagaatttgacctatttttccaactccaagaattctaccttttgtgttgtctccatacgttacatgccc

SEQ ID NO: 17672 - DNA, 363 bp, Glycine max
agcttcaagattaagatggcctcagcaaattccttatttccagaagggaattctatcaatagacctccaatctttaatggagagggttaccactactggaaaacccgaatgcaaatttttatcgaggcaatagatctaaatatctgggaagccattgaaatagggccttatatacccaccacagtagaaagagtttcaatagatggtagttcatcaagtgaaagcataaccatagaaaaacctagagatagatggtctgaagaggatagaaaacgagtacaatacaacctaaaagccaaaaacataataacatctgccctatgaatggatgaatatttcagagtttcaaattgcaagagtgct

SEQ ID NO: 17673 - DNA, 400 bp, Glycine max
tgcgggccctcaggcaatcctgcattctccctcttttttctgagccccatgaatgttattgcctagcgctgttcatgtgtcctccaccttcaagtttggagctatgtttcatgattgcctaagtgcggaccctcaaggcgatcctccattctccccgttttttggatccccatgaatgatgtagcctagcactgctcatgtgtactgcacctttgagctagcggctatgcttcatgattgcctaagtgcagaccctcaatgcaatcctccgttctccccctttttcagagccccatgaaagttattgcctaccgctgtacatgtgtactccaccttcgaggttggaactatgatacatgattgcctaattggggaccctcaaggcgatcctccattcttc

SEQ ID NO: 17674 - DNA, 362 bp, Glycine max
agctttctccactaagttgcctgatgcctaaaatgtcttttctgatggaagtggtcctagatgcaaggaataatttctccaagaacaccctcttaaggtcatcccagctgaaaatggacctgggagcaaggtagtataaccaatcttttgccactccctctagagaatgaggaaaagcctttagaaagatatgatcttcctggacatcagggggcttcatggtggaacaaacaatatggaactccttaagatgcttatgaggatcttcacctgcaagaccatgaaacttgggcaacaaatgtattagtccagtcttaagaacatatggaacaccctcatcaggatattgaatgcacaagctt

SEQ ID NO: 17675 - DNA, 357 bp, Glycine max
agctttctccactaagtttcctgatgcctgaaatgtcttttctgatggcggtgatcctagatgcagggaagaatttctccaagaacaccctcttaaggtcatcccagctgaaaatagacctgggagcaaggtagtatagccaatcttttgccactccctccagagaatgaggaaaggcctttagaaagatatgatcttcttggacattagggggcttcatggtggaacaaacaatatggaactccttaagatgtttatgaggatcttcacctgcaagaccatgaaacttgggcaacaaatgtattagtccaatcttgagaacatatggaacaccctcatcaggatattgaatgcaca

SEQ ID NO: 17676 - DNA, 370 bp, Glycine max
agcttttgactgactataccaagctctaggaaccagggacggagaaagatctatatataggcttgctaagggtagagagaggaagactagagatttggatcaagtaaagtgtgttaaggatgaagaaggcaaagtcttagtgcatgaaaaagatatcaaggaaaggtggaaggtgtatttccacaacttatttaatgatggatatggatatgactctagcagtctagacacaagagaagaggaccggaactataagtactatcgtcggattcagaaacaggaagtaaaggaagcgttgaaaagaatgagtaatggtaaggcggtggggccagacaacatacctattgaagtgtggaaaactcttggagat

SEQ ID NO: 17677 - DNA, 415 bp, Glycine max
ccgcttttatccatggactcctatggaggcgagcttcttcatactcatcttctccttgaagtggcgtctcctctctctcttacttatacattccgctgccattcatcttccaagaagcaaaggaatccattgatgaagaggatcctatgcctacaagctccaatggagcatacatcatgtggtatcaagagcatcttcatctaggcgatgttcttttgcttcctctatctttttgttccgagaattctctttaattacctgttcttcatcttactctccatgtatatcctccattgtcttgtggtttggtgctcgttagagtagatccaaaacaaatcaaccgattaaattttacatctacacttgttcatgcatctctatggttcatacttttgaaatctactcttgaatcatg

SEQ ID NO: 17678 - DNA, 368 bp, Glycine max
agttttggcttcttgattaagctcactgatgaacttcaatggagactgccagacaagaggttctgcagatgtaagatttagcaatgatgcacaggctccatgtttgtgtttcagagcaaccatatatggtatccgcctgcataaacacaccaatcaggaattcttataatatacaatgaggaaaagatgcagggctaaacataaaagctatgaacccaatctaccaataaatggccaaatcgttaaatgaggaaagttgcaataggaaaatgccagatatgagtacaggaaagggcccatcaaaacaagggatggaattatcatatcagagattctagaataacacagataaaataatcaataaccaa

SEQ ID NO: 17679 - DNA, 370 bp, Glycine max
  unsure at all n locations
tgttgtcaagcttgtgcatccaataccctgatgaggatgtcccatatgctcttaaaactggactgatccatttgcttcgaaagtttcatggccttgcaggtgaagacccgcaaaaacatctaaaagaattccatattgtctgatccaccatgaaacccctagatgtccaggaggatcacatatttctgaaggattttcctcattctttagagggagtggcaaaggactggctatattaccttgctccaaggtccatcacgagctgggatgacctcaagagagtattcttagaataaattctccctgcttctangaccacaaccatcagaaaagatatttcaagaattaggcaactcagtggagagagctt

SEQ ID NO: 17680 - DNA, 407 bp, Glycine max
tgtgcgctcttggcactgccatttgtttgataaattttgaaggagacctattccggagatggattaattgatgatgacatacctgttagtaacagcatacttatagctagctgtatagaagaaaagggatgataaaggtttaaataaaaaataagaatgtagaattatattctatatataacttaatgaaataatgaattttatatgcagataaaacgtaataatggtacaacttataatattattaaatagataaaatatatagtcaaaaaattctgatatatttagacatcttaataatatcaataccttattgagatcctcaatttctctctattatctgtttttaacacatcatattaattatttatcttctctttttttagatcttttatttttttttctat

SEQ ID NO: 17681 - DNA, 370 bp, Glycine max
  unsure at all n locations
agcttatcaaaaggcatgcgaagtgggtggaattcctagagcaattcccttatgttatcaaacataaaaagggaaaaggtaatattgtagccgatgctctttctcggcgtcatgcattactttctatgcttgaaacaaaattgattggtcttgaatgtttgaaaagcatgtatgaaaatgatgaaacttttggagaaatttttaaaaattgtgaaaaattttcagaaaatggtttctttagacattaggctttcttttcaaagaaaacagatgagtgaataggcaatttagtccctgagattgtaaccactttgcatattagtccctgacttanattntaattcataatagtccctaactttacataagt

SEQ ID NO: 17682 - DNA, 361 bp, Glycine max
agctttaaaagtttggctaagattatgttaaaacataagcacttagacaatgaatgaaagctggagttgctgcacatgatgtccaacgttatgtcaaagaataagatcgggctgcacaatgcacaaggcaagatgaaatgtcaaatgaagaattgaagctgcaggattcacgatgtcggatacaatgtccaggacatcctgctcgaaaatactggaattgctaaaagcattgaagctgcaggatccacgatgtctgatacaatgtccaggacattctgcccgagaatactggagttgctgtactatgcaagattaaagtcaagtagtgaagctgcaggatccacgatgtcggatacgatgt

SEQ ID NO: 17683 - DNA, 410 bp, Glycine max
tcaagagatcatcctctcgacaacattattgttgatattttatatgggcaacaactagacactctcttaaagatttatgcaataatatggcttttgtatccatgattgaacctaaaaatataaaagaagccataatagatgataattggatcattgccatgcaagaagaactaaaccaatttgaaagaaacaatgtgtggaaattagtagaaaaacctgaaaattatcctgtcataggaacaaaatgggtttttagaaataaattagatgaacatggtataattattagaaataaagcaaggttagtagcaaaagggtataatcaagaagagggaatagactataaagaaacatatgctcctgttgcaagattagaagccattagaatgcttttggcatatgcatccata

SEQ ID NO: 17684 - DNA, 419 bp, Glycine max
  unsure at all n locations
tctaaactntatacaagaatgaagctctgataccacttgttagacaagtggcctcagatatcttaagaagggggggttgaattaagatattacaaactacttccccaattaaaattctatttcactttctattcaagttataaattcccttaataatgaacttcttaaatattgattaaaatagaaccaattgaatatgaatataaaacaatgataaataaagaagtttaagggaagagaaagtgcaaactcagatttatactggtttggccacacccttgtgcctacgtccagtccccaagcaacccgcttgaaagttccactatcttgtaaattccttttacaagttctaaacacacaaggacaatccttcctttgtgtttagaattacaacaagagaccctcggtctcttaatccc

SEQ ID NO: 17685 - DNA, 414 bp, Glycine max
cagcttctaaactttatacaaaaatgatgctctgataccacttgttggacaagtggcctcaaatatcttaagaaggggggttgaattaagatatcacaaactatttccccaattaaaattttatttcactttctattcaagttataaattcccttaaaaatgaacttcttacatattgattcaaatagagcaatttgaatatgaatataaaacaataataaataaaggagtttaagggaaaagagattgcaaactcagatttatactggttcggtcacacccttgtgcctacgtccagtccccaagcaacccgcttgagagttccactatcttgtaaaagcctattacaagatctgaaccacacaaggacaacccttcctttgtgttcagatttctttacaacaagagaccctc

SEQ ID NO: 17686 - DNA, 364 bp, Glycine max
agcttttagaaagcttcgatgtagagtgtatattgtttttcttccatgcttcagttgtacatagcttgtgtcttcttcatagatagggcatgcatgatggcccttaacactatatccactcaaattcctgtatgctggaaagtcattaatggtacaaaatagcattgcactcaacttgaatgacttatttcgatacccatcaaacataacaaccccctcgtcccacaactttttcaagccttcaatcaagggactgagataaacatcgatgccatttcctggttgtcttgggctcgatatcatcatagacaacatcatgtatttttgcttggcgaagcattccatcgcaatttctctgatttgc

SEQ ID NO: 17687 - DNA, 339 bp, Glycine max
ttttcaatcttgtggcacctttcatggacgaagaaattcagaaggcaatttttaaagctgcagcgaagttttttatgaaggaaggcaattcacataaggattgcatggattaaatggaaatcggtatgcttaccaaaagaaaagggtggcttgggcatcaaggatattgaaacattcaatctcgcactacttggaaaatggaagtggcaattaatgcaagaaaatggtgagctgtggaccagagttctgaaatcgaaatatggtggatggaggaacattgaagaaacaggaaactcagcaaagcaatctgtttcgtggatggatgtaaaacacactttt

SEQ ID NO: 17688 - DNA, 409 bp, Glycine max
tcagaattcaatttcgagcgtctcaatagattacgggactcaatcagacatccgagcaaaacgttattgtcgtttggattagctcagagcttcagaattcaatttcgatcgtctcgatatattacgggtctcaatcagacatctgaggaaaaaagttattgtcgtttgaatttgctgagagcttcaacattcaattttgagcgtctcgatgtattacgggacttaatcagacatccgagttaaaagttattgtcgtttgaatttgctgagagcttcaacattcaatttcgagcgtctcgatattttacgggactcaatcacacatccgagtaaaaagttattgtcgtttgaatttgctgagagcttcaacattcaatttcgagcgtctcgatgtattacgggactcaat

SEQ ID NO: 17689 - DNA, 323 bp, Glycine max
atgaaatagtatcttcccttcttgccacaatccttgttgactacgagcatgaagagctccaatgaatgtgatgtcattatggatgacccctagtgcttccatatcttcagagatgcaatgctgcctcaccatgaccatgcatggcgaaaccagatatcatggcattttacattgaaacatcacggtccatggccgcagcaagcaaagcatctatgtctacacacttggcatacgtgtccaccaaagaagtcttaagaataataattcccttaattccttgcttgtctatgtaagaatggatccacttacccatttcaagtgat

SEQ ID NO: 17690 - DNA, 433 bp, Glycine max
  unsure at all n locations
aaaactcacgctntcgagaaattcaaacggccataactgtgcactcggatttgcgatacatgcacattaaatatcgagacgctcgaaattaaacaacggaagccctcgagaaattcaaatggtcataacttttcactcggaggtccgattcaagcatataatatatcgagacgctcgaaattgaacaacggaagccctcgagaaattcaaatggtcataactattcactcggagggccgattcatgcgtataacatatcgagacgctcgaaattgaacatcggaagccctcgacaaattcaaacggtcataactattcactcagaggcccaagtcaagcgaataaaatatggggacgctcgaaattgaacaacagaagctgtcgaaaatacaaatggcatcactattccctcggaggcccgatcgagcgtata

SEQ ID NO: 17691 - DNA, 456 bp, Glycine max
tctaagaatagccttgataactctaacattatccatataagcttcccctattaagattgtatcatccgcaaactgaagcatgtttactgggaccttattctttcctaccaaaaagctgtgaaagaagtttgtagagactgcttccctcatcaaacctgataacccttcagcagccaaaacaaataaaaaaggggccaaaggatccccttgcctcagacctctttgaggcttaaactcctcagttggactaccatttacaaggatggatattgaagctgaagaaaggcagcctttaacccaaccaatccacctttcatggaaccccattctcctcaacatatagaaaataaattgccaggacacagagtcataagctttctcaaagtccactttaagcactaaacacgatttcttttgcctcctagcctcctcaacaacctcactagcaatcagaac

SEQ ID NO: 17692 - DNA, 424 bp, Glycine max
gtgttaacgagatatttgtggataagttcttgattaagcctaacaacaatgacatcaattgcctgctacaaattggagaggcgcggtggtttccaagtttgttgggttctattgattgcatgcattgggaatggaaaaattgtccagttgcatgactagactaatatcgtaaaagtgatcattgcaaacccacattaatacttgaagtcgtcgctgatcgaggccgtacccgaatcaaataaacattataaatgtagtatctatgaagtgatcctatgtcgtctcccaacgagcaatgatctactcaacgttcataacaaatagtaatagaacagtacctaattggggggggtgtatgctttcggatattaatagccatccaatttgagttagaaaataaccatttacaacatgttgttcccct

SEQ ID NO: 17693 - DNA, 440 bp, Glycine max
  unsure at all n locations
tgaggganaacttgatgccttggtcaacctagtaactcatctggcaatgaataaaaaatctgcacctgttgcaagagtcggaggtctatgttcttctgaagatcaccatacagatctttgtccttctttgcagcaatttggaatcaatgagcaacctgaagcttatgctgcaaacatttataatagccccctcagcagcaaaaccaacaacagcaaaataattatgatctttcaagcaataaatacaatccaggtttaagaaatcatccaaaattgagatggacaagtcctccacaacaacaacagcttgtccctcctttctagaatgctgctggtccaagcaagccatatgttcctcctccaatacagcaacaacaacagtcacaactaagacaacaagcaacggaggctcctcctcaaccttccttagaagagttagt

SEQ ID NO: 17694 - DNA, 426 bp, Glycine max
  unsure at all n locations
ntanaggatgttntatcagtacaaaaatatatgtgttttcactggtaattgattaccaaatattgtaatcaattactagagatacattaccagagacaaattacataaaggctttttcaaaaagaagtttctcttttgaaatttgaattttaaatgctgtaatcgattaccacttgtatgtaatcgattacctgtgatgaaatttcagaagttaacattgaaaagtcgtgacctttcaaaacataactatgtaattgattaccaagaagctgtaatcaattaccagtgagagaatttttgaaaaatattctgaaaagtcacgtgtcttcaaaagtttttgaaaagccaccaaggacctataaatacgtgacttgtctacgaaaaacattagagtntttcattagaacctaagtgacatattctctc

SEQ ID NO: 17695 - DNA, 245 bp, Glycine max
taatattcgagcgtcacgaatattacaggtttactcagacttccgagtggaaagttattgctgttcgaatctgctacgagcttctgttctaaatttcgagcgtctcgatatatcacgggactcaatcggacttgcgagtgaaatgttattgacgtatcgaatttgctacgagcttcggctttgaattactagcgtctcagtatattacgggactcaatcggacttccgagtgagatgttattgtc

SEQ ID NO: 17696 - DNA, 362 bp, Glycine max
  unsure at all n locations
tgaaggcacactggatgcattggttaactnggtaacccagctggccttgaatcacaaatctgtacctgtcgcaagggtttgtggattgtgctcctttgctgaccaccatacagacctttgcctttccatgcagcaacctggagcaattgagcagcctgaagcttatgctgcaaatatttacaatagacctcctcaacctcagcagcaaaatcaaccacagcagagcaattatgacctctccagcatcagatacaaccctggatggaggaatcaccctaaccttagatgcgccagccctcagcatcaacaacagcagcctgctccttcctttcaaacgcttgtgccccacgataactatacat

SEQ ID NO: 17697 - DNA, 448 bp, Glycine max
tgtccattatactcacatttctggttcctcaaattctttataaacgccttagtgacctctggtctcacatatttaggtgggtgcaagccaccctttgaccagtcaacccaagtcaaactcctattagaattcttctccggaaacattatgttaacaaatgttggcaagtagtgttcatcaacatagcatggtctcgtgcagcgctcttgaaaaattgggaagtaggttttgtctgacaccacttctaaggcaagttctctgtccatttcgaaccattgagacccttttctccattgcttgagggtgaccatatgggacatgcgagggttgtaacgtccacgtgcaactagactatcttcatcataagccatcacatagctgtgggtggagtccatcacatatgagtagattggtgagaagttgatagagggatgcatgatctgatatc

SEQ ID NO: 17698 - DNA, 422 bp, Glycine max
  unsure at all n locations
tgtaacctattatgactntgacgaagtgcaacgcgtattctatggccattgaatttttttccttatcttccaatgctgcccttaccgccgttagcccttggccaaaagaatttgagtatcatatttatatgtttgataattattattattgttattattttttctcttgatgcacgtaaaagagaataacctaaacttttatatatgcgcattcaaattaaaactaacatacataaatggtcaattaatggatcttacataatgactcgttttcctttgcttctttcaggagagatcatcatcaattgatatggaatcatgtgtgcctcctggatttagaattcatcccacagaagaggagctcgtggtgtattacctcaagaggaagataaactcgctaaacatcgatctagatgttattg

SEQ ID NO: 17699 - DNA, 455 bp, Glycine max
  unsure at all n locations
atagaatactnacgcttgcagacaagactatacgaggtatcttccttgggtatatcaatatctctaagggctaccgtgtctacaacttgcaaactaagaaactcgtcatcagtcgagatgtggaagttgatgaatatgcttcttggaattgggatgaagaaaaagtggagaagaaggttcttatacccgctcaactacctcaagaagaagctgaggaagaagacccaggtgaaccaccttcacctccaccacaacaacaagatcaagaactatcatcaccagagtctactccaagacgagtaagatctttggtggacatatatgaaacctgtaacttggccatacttgaacctggaagctttgaagaagcgtcaaagcaggaagtatgggtcaaggcaatggaagaagagatgcagatgatcgagannaacaacacatgggagttagtaaatcgt

SEQ ID NO: 17700 - DNA, 423 bp, Glycine max
atttagaaaatacaaattaactcttttatatgctaattctgttttataaaataaaattaataaatagacagcttattaatggaaaaaattgtataatatgcatgagaccttagaatcaatttttttataatcattgtacacaaaagggaaataaaattaatttgatgtataatacttttcaattctaaaataagtatcgtcctaattattttacctaaataaagaaaaattattagaaatattagaaagaaaggtccaggaaaatgatctctttattcccatgacaaaatgtgtttatatacacatattgtattacaatcgtgatcctataattaagttaggactaattacactaaatatagaaatgaacatatatggaaagaattggtcttgatagctacacaccggcagatactaaatcat

SEQ ID NO: 17701 - DNA, 351 bp, Glycine max
gaagagagaatggaagagatccctgctgttcttccatgctttataatcagcggcgaagatcccgtctccgaaggcctgaaaaatgtgacgaaactcgggtcccttgacgtacgtgtggaaattcttgctcagcatgtggtggacgttgatggggtcgcaagtgaccaaatagtccatgttggtaaaccaaggtccaatgaactcaccagtgccaccatgtcgttgcaacacctgagatgaataatcatgggcacgccataaattgaacagtaattgtggtagcatgccaatgatacggtattctgtccaaatgggttgttgcaacatcgtctcctatggaagaaatattgg

SEQ ID NO: 17702 - DNA, 442 bp, Glycine max
  unsure at all n locations
ttaagacattntgcaacatcattntgtacattcaacattaacattctatttcttggcattggtaccttggtgattagattgtttctcccatctctgatggaaagattgaaatctttcatgtgaatatcatagcctttttcgagtaattgtcccaaactcaaaatattgatcttcatatttgggacatagtagacatttgatatgaattcatgtcttccaactttcaaacgaattaagatctaaagcatctatagtagacatttgaaatgaattcatgtcttccaactttcaaacgaattaagagtcttataattatcaccaaatgaaacactattctaaagcatctatagtcaagtattattggtgactatggcgacgataatacattaatgtntttgtatgagtagatcgactaatgaccacgtctcataggtcatggata

SEQ ID NO: 17703 - DNA, 415 bp, Glycine max
tatctccagcatagtcaacatcacagtagcttgtgagtccaaaatctttccttcttttaaagcatagaccaaggttataagttccaataagatatctaaaaatgcatttaataacagataaaaggactttccttggttctttttgaaaccttgcacataagtaaacactaaacattatatcaggcctatacgctataaggtataacaatgatccaatcattgctatttattgggttttgtccaacttttttagattcttcgtccaaccctaagtatctagttggatgtataggtgtctccatttcttttgcattgtccacgttgaacatatttagaagttctttcatatacttggtgatgcaatcctaccccgcaggccattgggtagaagactccaagtagattggctagagat

SEQ ID NO: 17704 - DNA, 407 bp, Glycine max
  unsure at all n locations
tcttaagcatagggacatctagtgctaaccttttttcactcaactgtgacaatgcttgatgatgataatgcccaagccttttgtgccagatttctgtgtgattctctatgagagagaaaacagcttgctccttcttcaatggatttagagcaaaactntttcctttcattttcacctcgaagatttcttgaccagctacatctttaattaagcaatttttgttttcaaatacaactttaaatcctcgttcaattagttggctgacacttaataagttttggtcaatttctagaacgaataggacatcaacaatacatcttgtgcctgcagaacttgtgattgcaactgtcccctttcctttgactgagatataatcaccattaccaattctgactctggtgactttt

SEQ ID NO: 17705 - DNA, 437 bp, Glycine max
  unsure at all n locations
ctttttccatggcttcctatggtggttatctntntcttgactcatcttctccttgaagtggcatctctaatcacctttcctcctactccattctgcttccattgatcttcaagaagcaaaggactccattgatgaagaagatccaaggcctacaatctccacatggagctacatcatgtggtatcaagagcatcttcatctaggtgatgttcttttgcttcctctatctttntcttcggttaattcactttaatcttcattttcttctccatgtatctcctccattgtcttatggtttggtgttgtttatagtagattcaaaaaaataaatcgattanatcttagatctacacttgttcttgcatttctatggttcaaattntatagatcaactcttgaatcatgnttttgtgttgattttaaggtgtatctttttt

SEQ ID NO: 17706 - DNA, 432 bp, Glycine max
  unsure at all n locations
tctatagaaggttcgttcctaatttatctacaattgcatcacctctcaatgagctggtgaagaagaatgtggcatttaccttcggtgaaaaacaagagcaagcctttgctttgctcaaggaaaagcttattaaggcacctgttctagctctttctgacttttctaaaacttttgagctagaatgtgatgcctctggagtgggagttggagctgtattgttacaaggtgggcaccctattgcttattttagtgaaaaaattcatagttcccccctcaactaccccacctatgataaagagcgttatgccttaataagagccctccaaacttgngaacattaccttgtttccaagggaattgtcattcatagtgatcatcaatcacttaagtacattagagggcaaaacaagttaaacaaaaggcatgcaaaat

SEQ ID NO: 17707 - DNA, 388 bp, Glycine max
agcttctattttagtgtaccagataaccacgggcccagccaagctatcttggaagaagtgcagcaacaacttctcatccctggaatgcgaccctatcttgcgacaatacattttgagatggcacttaggacaagttgtccctttgtacctatcgaaaccaggtaccttgaatgatgcaatcctaccccccaagggcattggatagaatactccaagaagattgggccaaagatgcaagagaaagccctagggttctcttaagccttatggtagatttcaggcccatggactaagtatgagcccacttatctttgtacatattagattaaggcttcattaatattgggtcttgaatttatggctctataatatatgtagggtaccctat

SEQ ID NO: 17708 - DNA, 394 bp, Glycine max
  unsure at all n locations
agctttagctataccaagacaaattttcttccttgttggccagtctagttttgttttgtttggatccctccctgtatgtgattgggagaaggacaatcagttagttgattatatcaaatatttgattcaaatggcaagtatggctaaagtttattcatcatgaagcttaccaaaaagaatgcgagatagacaattattttccatgtactcatatatcagtattagctggttgccctccacacaacatccataaagcttaacaagattgggatgttgaagtccagatatcagtcccatctcattcacaaactcacgatttccctgtttagattttgaagaaagctgctntactgctattattgtaccatctgataataggccctgcatcatgaac

SEQ ID NO: 17709 - DNA, 322 bp, Glycine max
agcttcgtgatctctatatcagattcaccaatgtctgcgggcatatgccccatttcttgacccaaatcaaaaccctcaaagtcatcgacctctcaaacaatagcaacgaactctacggcaacctccctgcctggctcccttctctgcccaacttcttcgaaatctccttcgacgcataccgcatctccggctccttctcgaagtcgctcacaggatgatgacgctcaccgacaaccgccttaccgggaagatttcggcgaaactggcgaagctggacttgaaggttgcgtacttgtgtcataatatgctggagggtgatgct

SEQ ID NO: 17710 - DNA, 395 bp, Glycine max
tatgcttgcttaaagatgtctttgattaattaattattttaaaatctagtgaaatactaactaaaaaaaaacataaaatttcgtataagtaatgtacaaatccaaaaataattgataaacaaaatcatattgaattcaagtcgttaaagcacaaagtatatataaaaaaagagcataatattaaaaaatgtatagattaggtcttcagtcccatagcttacaaatctattttaagtccaagcctataaacgaaataaaataaaatttggacaaaataagataagatttgatgaaatataatctggataaaataaaatctaaattgaataaaatctggataagataagatttgataaaataaatattattattattattgttagttaaacagttat

SEQ ID NO: 17711 - DNA, 385 bp, Glycine max
ttgcttcgttagttattattattctttaagcatgtctgtaacatggtttgtgcagtgcttgaaacttccagaattggcccatatgctttcgaagatatgataaagatgggtaaggatgctggagaggagcttctttctcgagccggacctggctttttcagtcgttaacaatccaccacattaaatggccaacacaatacttgatcagggaggttgcacggtcagctctttcagttgactgcatcccaagtatgtctattcttcaaccatgttgtatagactaaaatattcagctgagttggaaaaataagccactcatcatggtccaattggtgtatcttaaggtgattataaagccaaatttttgtattggtgtgtgtattat

SEQ ID NO: 17712 - DNA, 392 bp, Glycine max
  unsure at all n locations
agctttagctataccaagacaaattttcttccttgttggccagtctagttttgttttgtttggatccctccctgtatgtgattgggagaaggacaatcagttagttgattatatcaaatatttgattcaaatggcaagtatggctaaagtttattcatcatgaagcttaccaaaaagaatgcgagatagacaattattttccatgtactcatatatcagtattagctggttgccctccacacaacatccataaagcttaacaagattgggatgttgaagtccagatatcagtcccatctcattcacaaactcacgatttccctgtntagattttgaagaaagctgctttactgctattattgtaccatctgataataggccctgcatcatga

SEQ ID NO: 17713 - DNA, 397 bp, Glycine max
agcttttgtgtgtgtaattctgagtgctgatgcacagccttcttacaaggatggggtaattgttgtagtgactggctgcttaactggaagtgacaatctgaaaaggaagtttactcagtcctttttcctagctccccaggacaaaggctactttgttttgaatgatgttttcagatatgttgatgagtataagtcagttgatattgagtctgtgcctgcaaacgatgctgctgatgaaagtgctccaacagatgcttttgtccccgagcctggtaaatctttacatctgctggttatatatgatcgtattcctgttgtttttcattttcttcctctaacattttgcttatctttgtgtaacttgtaagtgtgagttttgaaacttttactttgatta

SEQ ID NO: 17714 - DNA, 334 bp, Glycine max
tagcttcaacattcaatttcgagggtctcgatatattacgggactcaatcggacatccgagaaaaaagttattgtcatttgtatttgctcagagcatcaacattcaatttcgagcgtgtcgatatattacgggactcaatcagacatccgagtaaaaagttattgtcgtttgaatatgctcagagcttccgcattctatttcaagcgtctcgatatattacaggactcaatcagacatccgagtaaaaagttattgtcgtttgaatttgcttagagcatcaaaattctattttgagcgtgtcgatatattatgggactcaatcggacatccgag

SEQ ID NO: 17715 - DNA, 390 bp, Glycine max
ttagctttgatgcaacatatggagatgttaatgaaacaacgagatgatgcgctccatgagaggttggatcaaatggagaatagagatcataatgaagaagaaaggaggagaagagggaatgatggtgttcctagacaaaaccgaattgatggttttaaactcaacattcctccatttaaaggaaagaatgatctggaggcctacttggagtgggagatgaaaatagagcatgttttctcatgcaacaactatgatgaggaccagaaagtgaagcttgctgccacggagttttccgactatgctcttgtgtggtggtacaagcttcaaaaggagagagcatgaaatgaagagtccatggttgatacatggacggatatgaaatagatcatg

SEQ ID NO: 17716 - DNA, 385 bp, Glycine max
ttgcttatccgtagaggtgatggaccttttcaggtcttggagaggatcaataacaatgtctataggttggacctcccataagagtatgcagttagaactttataggtggagctaatactgaggagcatgaaccaacagatttgaggtcaaatcctcttcaaaggggagtgggtgatgcaatcctccctaggaagggactagtcaccaaagccatgagcaagaggctccaagaggattgggctagagctgttgtagaaggccctaggattctcatgaaccttagggtagatttctgagcccatgggccatgttgtgtccacttatctttgtacatattagattaggatttcattatttttgggccttgtatttagggctccataat

SEQ ID NO: 17717 - DNA, 345 bp, Glycine max
  unsure at all n locations
agcttcaacatcagaccacttccagggtgctggaactacttcacatggacttgatggggcctatgcaagttgaaagccttggaggaaagaggtatgcctatgttgttgtggatgatttctccagatttacctgggtcaactttatcagagagaaatcagacacctttgaagtattcaaagagttgagtctaagacttcaaagagaaaaagactgtgttatcaagagaatcangagtgaccatggcagagagtntgaaaacagcaagtttactgaattctgcacatctgaaggcatcactcatgagttctctgcagccattacaccacaacaaaatggcatagttg

SEQ ID NO: 17718 - DNA, 388 bp, Glycine max
agcttgcttctacactaacacttttcgaaaggggagtcatcatattaccatgttcgtgctgagtgtatcatgtgttggatcaagtggcctcagaataattaagaaaggggggttgaattaattattactagacctttactaattaaaaattacctttcttaggcttttactataatgttaagaaaataaagaacagaaatagaaacttaaccaaaagtaaaagagataattaaagtgcatagcggaaattaaaagagtagggaagaagaagacaaacacacaagagttttatactggttcgacaacaacccgtgcctacatccagtccccaagcaacctgcggtccttgagatttcttttcaaccttgtaaaatcctttacaagcaaa

SEQ ID NO: 17719 - DNA, 391 bp, Glycine max
  unsure at all n locations
agcttagcttatgtacctgggtgttgcccaatttcatcatatcttctgtaatactcaccacctctatcatatctaataatttttacatttatgtctaattgcctttttacttcattgtagtaaatttctaaagcatccattgcctaagatatctcgggcagtaagtagacataaccgtaatgtgaataatcatcaataatggtgataaagtatcattccttttcgaaagaactaacatcaaaagatccacaaatatcagtatgcacaatttcaagaagctgagtgcttcttgtagctcctttctttgtatgttttgcttgttttcccttaatacaacccacacaaatatttagatccatanaatctagataaggaagaaattgattcttta

SEQ ID NO: 17720 - DNA, 399 bp, Glycine max
agtttacatatattccccatgtgataatctgaacaagagagaattatgggaagcactaagccagctaagacaccaagatcctgagggattatggtgcttcttcggagattttaacagcattagacaccagtccgagagagaaggggtggctcacaggggtatggaagcaaacaacataactgattttagtgaatggctagccgacctagaggtagaagaaatacctagtgtggggagaagattcacatggtttaatccaaacgggactgcaaagagtaaactagatagattttttgtctctcatgaatggctcaacaaatggccaggctgcacccaattcatcttggatcggaacttctcggaccattgtcccatacttatgagagctaagaacattgg

SEQ ID NO: 17721 - DNA, 168 bp, Glycine max
ttgctttatcatctgaccactttcagggagctggtgctacctctcattgacttgatggggcctatgcatgttgataaccttggaggaaagatgtatgcctaggcatgtgcggatgatctttccacatttacctggggtaactttatgtcagatagatctcacaccttt

SEQ ID NO: 17722 - DNA, 357 bp, Glycine max
agcctatgcatccggaattcccggatgaggacatcatggccttgttcgaggaaaagttggacgaagatcgggacaaatggactgtatggtttgacggagcgtcaaacattctatgtcatggcgttggggcagtgttgatctctccggacaatcaatgtgtacctttcacagccaggctaggattcgactgcaccaacaacatggccgaatatgaagcatgtgccctagccgtccaggcagcaattgactccgatgtcaaactactcaaggtgtacggcgactcagcgttggtaatccatcagctgagaggagaatgggaaactagagatcccaagctgataccctacaaagcctaca

SEQ ID NO: 17723 - DNA, 392 bp, Glycine max
agcttgaattatcgttattaacacgattttttaatcaattgagttaatagatcaattatgttataaaataattaatgtcattatatataacactaaattttttaatgtatatttaatgtacatataagtttacataatatatattgtgacaattaattttgatctaataatttttttacatatataaatttttattaaacttgtaattcttatttaaaaaatatattgttaaatcgaaattaattataataaggtcaaaaacagaaatttatttactataataattataaaaaactataactaaatttattaatttttttaatcttttactaaaaattttgagtgatacagattgacaatccgtatacggattataaatctatatgtttatt

SEQ ID NO: 17724 - DNA, 394 bp, Glycine max
agcttgtatgttataatcataaagttatcatgagatgctaacaacacactcttttgaatacactctctacacttgcagaaatttattaaaaatcatgaatttttatggatctcacttcttatttaatgagtttctctccttaatttgtagtttttaacaaattttaatcaataacaaaatacgtgttaaaaagagtgtgttgctaatccttctcagattatcataatcaatttattgggtacaaacatttttgtggatcaggtgtggctggagaagcgttatgttgggtcacgtcacacatctgaatggttcaatacagcaggaagaaatgttaagacggggcttattgcaagtgtcattgtgtctcacgtaatggattcaaatagcctcatag

SEQ ID NO: 17725 - DNA, 384 bp, Glycine max
tatcttggtttaaccaaagtcccctaatgtccgtgtcatgtcggcgtccaacaaaatgttgctcgatttgatgtccctgtgaataacaacctggtcccaaccgtggtgaatgtagctaagcccctctgccacgtagacaaggatacgacggcgttgctcccaccccaaagacttctccgacttatctaaaacccacttgttgagactcccgttgggcatgtaatcataaaccaacataagctcgctcccctttctgcaccaccctctcattagaaccaagttcttgtgctgaagcctacccatgcttgaaatctcctccatgaattcccgcaaccctttgcttgaatagtggttcacgcactttaccgcaatttgcgtatgggt

SEQ ID NO: 17726 - DNA, 371 bp, Glycine max
tagcttagagagattcccgatctgagagggtactgttccgttggcaacatatctcatgtcaagatacaccaaatttgagagattcccaatctgaggaggaatcttcccacggaatccagtatgagagaggttgaggtgagtcaaggaagtcattgtcccaaggaaagaaggaattgacataccttctccaagaaatctattgccgctcaagtccaagtaattcaaatgctttaaatcagccaaacaaggacttatctctccaccaaagctccatctctggtaagcttcccaatcgaagtgatagttgccatcatataaagcagaatgtgaagtgttgaggtgaagctgaagaagatgggaagtgacgttgt

SEQ ID NO: 17727 - DNA, 395 bp, Glycine max
  unsure at all n locations
agcttttcctcattctctggagggagtggtgaaagatgggttgtactaccttgctcccaggtcctttaccagctgggatgacctcaagaaggtgttcttggagaaattcttccctgcatctaggaccattgccatcagaaaagacatttcaagcatcaggcaacttagtggagaaagcttgtatgagtacttggaaagattcaagaaattgtgtgcaagctgtcctcaccaccagacttctgagcaactcgttcttcaatatttctatggggacttancaacatggagaggagtatgaatgatgctgccaatggtggaactcttggtgatatgaccactgctgaggctaggaatttgattgagaagatggcttccaactcccaacaattcagtgc

SEQ ID NO: 17728 - DNA, 379 bp, Glycine max
ttgcttaagcacgagtaaattgctacatgcttaagcggtgtttaaggtgcatccttatagtgtatgcttaagaaagttatgcaaaatgcttttttttttaaaaaaatggtattccaagtgtgataaaatgaatattggttcatgatatgagtatttatatatagtatggagttaattttatgctaatatcatgcacttcacattcatatgacgattttgatgtggagattgtaaaaattcaaggagttggatgtcttactatgcttaacaaactattgatggattcataagtgtgatgaatatatgaatggttaatttatgatatgagcatttgatgaaatattgatataatgaatagataattatattgataagataa

SEQ ID NO: 17729 - DNA, 392 bp, Glycine max
agcttgataggtggaaggagatgtatagaaggagcacgaaattttgtgcctcaattgaggtttaaactttgaagtgtaattctcaaatgatcaaagtttaaaaaatgcacacacatgacctctatttatagcctaagtgtcacagaaaattggagggaaatttgaatttctatttaaatttcacttgaatttgaaatcgaatttgtggagccaaaatttcactaattatgattagtgaattttagctatgattcaacccactaatccaagatcaagtccaagattctccactaagtgtgcttaagtgtcaggaggcatgtaaagcatgaaggacatgcacaaagtgtgactatatgatgtggcaatggggtgtagcaagcaaatgctcacct

SEQ ID NO: 17730 - DNA, 408 bp, Glycine max
  unsure at all n locations
tgcaaaccaaatgctcaccactactagaagagaagttttcaggttgtttcatataaacctcctcctctatatcaccattaagaaaagtcattttcacatccatttgttgcaactcaaggtcaaaatgagcagctcatgccaagataatacgaagagaatatttcttagatactagacaaaaagtctctctatagtcgattccttctttctgagtaaatcccttagcaataagtcttgccttgtatctctcaaagttgcctaatgaatcccttttggtcttaaagatccatttacatccaatggcctttgccccattaggcaactctacaaggttccaaactttgttactctgcatggaattcatctcatccttcatggcattataccatanatntgacactttacaac

SEQ ID NO: 17731 - DNA, 370 bp, Glycine max
tgtttagaaactttactgttggaaacttggaaaagcaaagtaaagaccataaataataccagaccctaaagcttaatttaagaaatagattctgaaatccattcaaagaagacaaaactagaatgtgaaagtccaacaatatatatagataaaattacccatctcaactttgaaaataaattaagaaaataaaaagaggaaactagctgattttcttgctttgccacacaagtataaaaaagcacagaaacaagggtataaatatagaatatataactaaaatgtagcaatataacttacaattaaagtgattgctcttgtatcttcatccatcattatgttaccatattgtagatcattgtgacaaaaa

SEQ ID NO: 17732 - DNA, 390 bp, Glycine max
  unsure at all n locations
agttttattcaagacaaagaaatcaaagatattcaagatggatgatcaagacagtctctagagtcttagcaatagaatataaataggaagggaattccaattgaagtagcaaaaggtttggccaagaaatttaagttaaaaagtctttttcaagagatttactctctggtaatcgattacgacagctattaaaatttgaattcaaaatttgcattgagtaatcgattacacatatatggtaatcgattaccagcaattattgaacgttttaattcaaattttaaagcttgtaatcgattacacacatactgtaatcgattaccagagtagattttcagaaaatattctcaatagtcacatctttntatttggttcttgaatggctatcaa

SEQ ID NO: 17733 - DNA, 327 bp, Glycine max
  unsure at all n locations
tgtttgcaaaccattgatttggtagaagattcaaaccctagaagttgttgcatgcacacctcctcttcaagaatgccattacgaagtggtaacccataagtgatagctaaggagagaagaagtcttactattatggacttgataataggtgagaaagtctctatataatcaattctatactactgatgaaatctcttggtcactaatttggctttttactttntgaccgagccatctaggttttctttaaccttgaaaattgacttacagtcaataggaactctattatggggcaagggaacaagcaaccaagtgtcatttttaatc

SEQ ID NO: 17734 - DNA, 414 bp, Glycine max
tgaaggcaaactggatgcattggttaactcggtaatttagctggtcttgaaccataaatctgtacctgttgcaagggtttgtggcttgtgctcctctgctgaccaccatacagacctttgcccttccatgcagcaacctgtagcaattgagcagcccgaagcttatgctgcaaatatttacaatagacatcctcaacctcagcatcaaaatcaaccacagcaaaacaattatgacctctccagcaacagatacaaccctggatggaggaatcaccctaatctcagatggtctagccctcagcaacaacaacagcagcctgcttccttccttccaaaatgctgctggcccaagcagaccatacattcctccaccaatccaacaacaacaacagctccagaaacagtcaacagttg

SEQ ID NO: 17735 - DNA, 287 bp, Glycine max
atcttgccgccacggagttttccgactatgctcttgtgtggtggaacaagctacaaaaggagagagcaagaaatgaagagccaatggttgatacatggacggagatgaaaaagatcatgaggaagcggtatgtgccggctagttactcaagggacttgaaattcaagctccaaaaactaacccaaggcaacaagggggttgaggagtatttcaaggaaatggatgtgctcatgattcaagcaaatattgaagaagatgaggaggtaactatggctcgatttcttaat

SEQ ID NO: 17736 - DNA, 343 bp, Glycine max
tataatatattattacgctcgaaattttacatcagtagctctcgagaaatgcaaatggtcataacttttcacccggatgtccgattatggcgaatcacatatcgagacgctcaaaattgaacaacggaagctcttgagaaattctaatggtcataacttttaactcggatgtccgattcaggcgcattacatatcgaggcgctcgaaaaagaacaacggaagctctcgagaaattcaaatggtcataacttttcacactgatgtccgattcaggatcataatatatcaagacgctcgaaattgaacatcggaagctctcgatatagtcaattggtcatcactt

SEQ ID NO: 17737 - DNA, 391 bp, Glycine max
  unsure at all n locations
ntgatttcctctgttccggaaacctttcttttctcatgtgcacccaaacccaatctccgggttcgaagacaaccttctttctccctttgttggcttgtttagcatagcttttacttttcctctcaatttgatctttgactctctcatgaagcttcttcacatagtccgcctttgcttgaccttctttatgcttaaaaacagaaacattaggcaaaagatcaagaggagttagtgggttaaaaccataaacaacttcaaaaggagaacaattagtggtgctatgaacagctctattgtaagcaaattcaacatggggtaaacaagcttcccaagtttttaagttattcctcaaaactgtcctaagcaaagttcccaaagtcctattaacaac

SEQ ID NO: 17738 - DNA, 388 bp, Glycine max
agcttgaaggtaaactagatgccttggatatcttggtaacccaactggccttgaatcagaaatttgtacctgtcgcaagagtctgtggtttatgctcttctgctgaccaccatacagacttttgcccttccatgcaacaacctggagcaattgagtagcctgaagcttatgctgcaaacatttacaatagacctcctcaacctcagcagcaaaatcaatcacagctgaacaattatgacctctccagctacagatacaatcctggatggaggaatcaccctaatctcagatggtctaaccctcaacaacaacaacagcagcctgctcctttcttccaaaatgatgctggcccaagcagaccatacattcctccaccaattcaacaact

SEQ ID NO: 17739 - DNA, 432 bp, Glycine max
actcagctcaacataaccacttcgggtgctggaactactttacatggacttgatggggcctatgcaagttgaaagccttggaggaaagaggtatgcctatgttgttgtggatgatttctccagatttacctgggtcaactttatcagagagaaatcagacacctttgaagtattcaaagagttgagtctaagacttcaaagagaaaaagactgtgtcatcaagagaattatgagtgaccatggctgagagtttgaaaacagcaagtttactgaattctgcacatctgaaggcatcactcatgagttctctgcagccattacaccacaacaaaatggcatagttgaaaggaaaaacaggactttgcaagaagctgctatggtcatgcttcatgccaaagaacttacctataatctttgggctgaagccatgaa

SEQ ID NO: 17740 - DNA, 422 bp, Glycine max
  unsure at all n locations
tcttagtctcacctgatngaattgtggctacttcatgcactcctctaatgacaatagcatcacttctagcactaaattgctgggagtttgaagccatcttctcaattaaatttctggcttcagcaggggtcatgtctccaagggctccaccattggcagcatctatcatacttctctctatgttgctgagtccttcataaaaatattggaggagaagctgctttgaaatctggtggtgagggcaactagcatataattttttaaatctctcccagtattcatataagctttctccactgagttgtctaatgcctgaaatatcttttctgatggtcgcggtcctggaagcagggaaattgttttctaagaatactctcttgaggtcatcccagctcgtgatggaccttggagcaaggtaatat

SEQ ID NO: 17741 - DNA, 281 bp, Glycine max
agtttcccatgtttataagttcttactcaaaactgtcctaagcaaagttcccaaagtcctattaacaacttacatttgcccatcggcttgagggtgacaagaggttgaaaataacaatttagcgcccaacttgctccacacaatcctccaaacatggctgaggaactcagagcccctatcactaacaatgctccctggcaaaccatggagtctgacaatctccttgaaaaacaaatcagccacatgggaagcatcatcaatttttttacatggaataaaat

SEQ ID NO: 17742 - DNA, 337 bp, Glycine max
agcttcaacattcaatttcgagcgtctcgatatattacgagactcaatcagacatcagagaaaaacgttattgtcgtttgaatttgctcagagcttcaacattcaatttcgagcatctcgatatgttacgggactcaatcagacatccgagaaaaaagttattgtcgtttgaattagctcagaagttcaacattcaatttcgagcgtctcgatatgttacgggactcaatcatacattcgagaaaaaagttattgtcgtttgaatttgctcagaggttcaacattcaatttcgagcgtctcgatatgttaccgggcttaatcagacatccgagtaaa

SEQ ID NO: 17743 - DNA, 398 bp, Glycine max
aagcttgagccactaaacgacattaacgttttctcttatgtctgatcgagtcccgtaacatatcgagacgctcgacattgaacgttgaagctctgagccaatacaaacgaccataacttttttctcagatgtctgattgagtcccgtaacatatcgagacgctcgaaattgaatgttgaatctctgagcaaattcaaacgacattaactttttactcggatgtctgattgagccccgtaacatatcgagactctcgaaattgaatgttgaacctctgtgcaaattcaaacgacaataactttttcctcggatgtctgattgagtcccgtaacttatcgagacgctcgaaattgaacgttgaagctctgagccaatacaaacgaccattactttttact

SEQ ID NO: 17744 - DNA, 427 bp, Glycine max
aactcaagcttctctcaaatgagatgacaatcaatctctatatgctttgtcctcttatggaagactgggtttgaggcaatataaagagcaacctgattatcacaatacaacttcatttgcaactcttcacaaaaccttaattcttgaagaaattgtttgatccacatgagctcacatgtaaccatagccatagatcgatactcagcttctgcactggaccgagcgacaacagtttgtttcttgcttttccaagagattagatttcctccaatgaagacacaataacctgatgtaaatctcctatccatgggacatccaacccaatcaacatcacaatatcctgatagttgcgtactacccttggcttcatacaacaacccttgtccacgagctttcttaacatacctcagaatacgcatgacaacat

SEQ ID NO: 17745 - DNA, 430 bp, Glycine max
gacctataaaactcagcttaaccccttttaaagaaggctttaatgcttatgaagatttaacaatcaatttaataattttctttaaacgtgcaagataaaattgattgcaataaaataaataagataagggaagaaagaattgcaaactcgatttatactggttcggccacttcatgtgcctacgttcagtccttaagcaacccacttaagattttccactatctctgtaaatcatttacagactttgaacacaccttgggattccttacccttgtgttcaagattttcacactccaagagacaccccgtctcttgattacaactgagtttctgagatgaacagaaagatctctctcctttagagtggatgatacaaattgaagatcctagaggaaatttcctcttttagagatgataatacagattgaag

SEQ ID NO: 17746 - DNA, 407 bp, Glycine max
tgtgcctcgttacgtttggaatatgaatgttgcatttatatttaaagacccttaggtgctttgttgatggcttcttcctgtttcaagcttcaattggagtcttgtcttttacagacttagttggacatctattgagtatgtaaacagcagtgtagactgcttcagcccagaatgtattaagtagtcccttctccttgagcatcaatctagccatttccataactttgcgattctatctctcggacactccattttgttgaggagaatatgctactataagttgtcgctcaatgccttcatcctcacaaaatctttcagactcgcgagaggtgtactcttcgtcgcgatcacttcttagctctttgatccatttccactttgattttagcaaggccttgaacttttga

SEQ ID NO: 17747 - DNA, 352 bp, Glycine max
actaagctgctcggggatctactacgctttagaacttggtatgctgcctagcaatttacactaccacagagaatgagctattagcgatagcttttgctcttgagaaatttcgatcatatttgcttggtactcgagttattgtttatactgaccatgcagctctgaagtacctgttgaagaaggctgaatcaaaacctatattgatcaagtggatgctatggatccaaaagtttgatttggagatccgtgatcagagcggttcacaaaacctcatggctgaccacctgagtaggattgagcgtgcgcctgaagactcacccattacggatgatttttcagatgaccatttgta

SEQ ID NO: 17748 - DNA, 321 bp, Glycine max
agcttaagctccttcaactgcttatggctcttaatatttgaagaggatacttgaggaaccttcaccggacgaagacactgacaaaaacttatcttctccttcttggacaaagtatggcaggctgggggcaagtaaaatttcttacaatcagaccttggatgcagctgagatcgcatacccatatcagctagatcttgacgagtattcaagccatccttcatcttgccttgaatgttaaggagcgtcccaatcacactgtgacaatacattctccacatgcatgacactcgtacgatggctagcgccgagatcacgccagta

SEQ ID NO: 17749 - DNA, 377 bp, Glycine max
  unsure at all n locations
catctatcctncactccatgtagaattatcctcatcggntccccactgcaccttcaccaacgcgatctcctttcctttcaacgacttcattcttcggtcagagatcttctgaggttgtgctttataggtgaggttatccttcacctgtacctcgtccactgcaagaatatgtgatggatccgggttgtaccgtctcagttgagagacatggaacacagggtgcaaattcgataaactcggaggtaaggcgatatgataagctacaggcccaatcttcttcaaaatctgatatggacctagatacttgggtgtcaacttcctagccttgagagctcttccacactccgttatgggagaaaccttcacaaaccatgttc

SEQ ID NO: 17750 - DNA, 260 bp, Glycine max
tagactcagttcaacctaccatcctttatctgattgtttaacttaacggaccataaaatcgttggaggaccttttgagggcgtgtgtcttagagcaaaatggaagttgggagagttttcctgccattgatagagtccacttacaacaatatgtttcactctaccattggcatggctccctatgaagatttgcatggtataaggtgtaggacacctctatgttggctagatcctgcagtaaaccttaccttatgaccttga

SEQ ID NO: 17751 - DNA, 363 bp, Glycine max
agtctttcagcaataacatgatcttttcagcttctattcaagtgatcaattcttttcttccaggtcatgtacattgcagtctaaatcaagtccatatcagcatctttcatatgcaccatcaacaatttcagaacttcacacacctgttcattggaagagacaaatctgtctccaacaacaaaactgcaaatctggtctttcaattcaatccagctcctccccgagtcacttttatttttaatgcctctcctcagcttcgttgagctggcaaaatcatcccagtttccttcagcggcataaatatttgatatcaacgcataagttcctgcactatatggcttcatatccaaagctctcaaagct

SEQ ID NO: 17752 - DNA, 377 bp, Glycine max
  unsure at all n locations
cagcttgtanggttaaagnctcacttttgtcacgtgctcatgcaacaattgttagccatggctatacgagacatctttccaaacaaaggcaagttagccataactcggttgtgctttttcttccatgctatatgtagtaaagtcattgatcctgtcaagtttgatgagttggaaaataaggccgcaattatactgtgccagttggagatgtattttcccctgctctcttagacatcatgattcacttgattgtgcatctagtcagagaaatcaaatgttgtggttcggcttatctacggaggatgtacccggttgagcgatacatgaagatctntaaagggtatacaaagaatctttattgtctaggagcatctatt

SEQ ID NO: 17753 - DNA, 376 bp, Glycine max
tgtttcccaagtttttaagttcttcctcaaaactgtcctaagcaaagttcccaaagtcctattaacaacttccgtttgcccatcggtttgtgggtgacaagtggttgaaaataacaatttagtgcccaacttgctccacaaagtcctccaaaaatggcttaagaacttagagtccctatcactaacaatgctccttggcaaaccatggagtctcacaatctccttgaaaaacaaatcagccacatgggaagcatcatcaatttttttacatggaataaaatgagccattttagaaaacctatcaacaaccacaaaaatggaatctctaccattgcttgtttttggcagccccaaaacaaaatccatggataaatca

SEQ ID NO: 17754 - DNA, 334 bp, Glycine max
agctttttcaaagtcaagtttgaaaaccatgcaggggttatttttgaatttagcttcaactaagacctcattagctatcattacaccatggaggatatgtctgcctttgaggaaagcaatttgcctttcatcaattaagtgaggcagcacaagagccagcctattagccaggactttggacattattttgtaaacacaccctatgagagagatgggtctatagtcattaagagattgggggctattggttttggggatgagggctatgaaggatgcattacttcctttggggaatctgccattaatgaagaattcatcaaagaatatgataaaa

SEQ ID NO: 17755 - DNA, 416 bp, Glycine max
  unsure at all n locations
tgaaattaanaacaaaggctctaagcaaattcgaatgacaataacttttgactcggatatccgattgagtcatttaataattcgaaacgctcgaaattgaatacagaagctctaagcaaattcaaatgacaataacttttgactcagatattcgattgagtcattttataatttgagacgctcaaaattgaatgcaagagctctcaccaaattcaaatgacaataactctttactcagatgtccgattgagtcccgtaatatatcttgacactcaaaatggaaaacagaagctctgagcaaattcaagcgaaagtaacttttgactcaaatgtccgattgagtcatttaataattaaagacgctcggaattgaatatagaagctgtcacaaaattcaaatgacaataactttatac

SEQ ID NO: 17756 - DNA, 363 bp, Glycine max
  unsure at all n locations
tttatgcatgtttatagtcattacttgttgagaaccataagccaaagttgaatgttcctttgatatagtaaataatttgttttgtggccttgagatgagtagtggttggagtctccatgtattgactgatgagtcgagtaccatatagaatgtctggtcttgtggacgtcaaatatcacaaactacccaccaaactcttgaaatttgtagcacccatcttttttgcttcgtcaaactttgataacttcattntgcactccaccggtattccaattggcttgcatagttttgctatgaaatgaagattcaatcttcctttngctttacctcaataccaagatagtatgacattaatccaatatc

SEQ ID NO: 17757 - DNA, 418 bp, Glycine max
tccttaagaagattcctaaagaagctagagcttagctacacatacctctctaatagctaagctcacctccttgaaatgagaagctagagcttagctacacaccccctataatagctaagctcacccccatgaaaaaatacaaaaaaaaatccttactacaaagactactcaaaatgcctcgaaatataaggctaaaaccctattctactagaatggccaaaatacaatgcccaaatgaaggaaaaacctattctaatatttacaaagataatcgggctcatacttagcccatgggctcgaaatctaccctaaggctcatgagaaccctagggccttcccttggatctctggcccaatatacttggagtcttctatccaatgcccttgcgggataggattgcatcattatgtacatatt

SEQ ID NO: 17758 - DNA, 406 bp, Glycine max
ttgaaggtgcgtagtccaccattttccctagtagaattctggtaatgtgtctactatcattgtcatcgtttttttcgtcattgaggtgccacttaagctgccaggttctctccacctttgggcgtattcttttgaaagaatcgtgccctctttttgcacatgttctatagttgcatcctatccgaagacattatactgacactgcctaacgaaggcaaccactaggtcattccaagaatggactcgggaaggttccaagttagtgtaccaggtaacagctaccccagtaagactttcttggaaggaatgtatcagcaattccttatcttttgtgtatgcccccatcttccgataatgcatctttagatggttcttggggcaagtagtcctctcgtacttgtcaaag

SEQ ID NO: 17759 - DNA, 395 bp, Glycine max
  unsure at all n locations
ntgaataattgttgccaaaatgtgctgataaatattctatctttgtcagaaacaattgtttttggaaaaccatgaattttgacaatgttggcaatgaaaacttcagccacaaccttgttattaaactcaaacttcaaagggataaagtacccaaatttggacaatctatcaactactgtaaaaatggttgtaaatccttgtgaaggaggcaattaaacaataaagtccattgctatgtcttcccatatttgttgaggaatgggaagaggctgtaacaacccagctgacaaaacatgatcaactttagcttgttgacatatggcacattccctcacaaatttactaatatcacttctcataccattccaatanaattgagcaccaattctagctac

SEQ ID NO: 17760 - DNA, 383 bp, Glycine max
agcttgccattagttaacactgttccattataattaaccgaagtgtcaaacattttcattcaaatcttgttactattactattttaagcctcccctttgttttcattcaaatcttgttactaaaaactataaaaactacaaaaacaaaggtcaacatgtaaatactatacaactaggcaaacaattttacctctttttgttcaagtatcttatccaattctttgagctctttatccaatttttcttgaagggatgagtgttctagctcctttgtgtcttcttccatttcatctacaaacaaggtacatacatttaaaaaccatcaataattaggataaaatgccaatgcacaaagagagaaaaatgaaaattaaggagcccaa

SEQ ID NO: 17761 - DNA, 373 bp, Glycine max
agctttttataaatcactactaaaatctaaagatgatctgaagttcaaccaaagttctcagtcgccttttttcttttggccatgttcttatttacgtttaatgtttttgtagactgtgagtggaaggcgcacgccggtaacatatgtgttgcatcatttgattggagctgcagtggaatctgtaagtcagtggagaagattaaatatgtccactctaagtgtggtgaaggaaatggagcagtttggagtgctctatcttagattgtttctaaaagggagatggttttttctggttgggagaggatataattgcagctgggacaaagacaaagacagttttcagatttgagattgagcacataggtataacatg

SEQ ID NO: 17762 - DNA, 340 bp, Glycine max
tttaactgaatttgcaacgttccaattgctttttaaatggtgtaatcgattaccagtgcatctgaacgttgaaattcaaattaaattgtgaagagtcatatcttttcataaaatgctttgtgtaatcgattacatggttttggtaatcgattaccagttacacgttttgaatagaaagtcaagagatataactctttcaatggttttcagttctttctcaagggtataactcttccaatggttttcttgaccacacatgaagagtctataaaagcaagaccttgacttgcatttcaaagagacttacaactcttacaactttttgaacatctctttgaac

SEQ ID NO: 17763 - DNA, 427 bp, Glycine max
  unsure at all n locations
ctatacacaactcaagctttgtaacaatccaattttcaccttatagaaatgaatcttttatgtcgtctggtgtattntaagaggtttaatcattttaatatttttaataaaattgaaattataatttttttaaaataagattgtttggtatgaggaaatcaaaatgcatgcaattgaggttatgtcttgtttgatattttaagcatactaacttttgatgtgattgcgaaaaattatacatatcttcgtccttaaatataacattatattaatttggtttgtctttttttataaaagtctttctaagttgacttttgcattaatttttttacccagatatccttagttattctatagtacatgttatgtactactgaacagataaatgtataatatctcatcactactataaaaaagatcttttaca

SEQ ID NO: 17764 - DNA, 418 bp, Glycine max
actcaagcttataaactttctgcgatgaaatctaacaaataatattttttattcatttctcttattctcatctcactttgttttatgaccacaacacagacaaggagtgaggcatagtcttaaaaaattaaaataaaagatatatggtacgtaaaagttaaatagtatgcatattcggctaaaacataataataatgtagtttataatgttagtcaaggaataaaatagttcaattgtaaagacaaaaagtaggcatatggttataataagtatacatgatatttttcgctatatgttccgaatgtgaatggttaggatgatgaactaatttatataattaaggggtgtgtatcttctttttcacacaaagagatttaaattaaaattctctattatttaattaaattcctttgatat

SEQ ID NO: 17765 - DNA, 375 bp, Glycine max
agcttgccttgccccttgatatatttgagggactcatggtcactatgaatgacaaattccttgggataaaggtagtgttgccatgttttcaaagcccgtactaaggcatacaactccttatcataagttgaatagttaagggtaggaccacttaacttttcactaaaataagcaattggatggccttcttgcatcaacacagccccaatcccaacatttgaagcatcacactcaatttcaaaagatttttgaaagtttggcaacgcaagtatgggggcattagttagcttttgcttaagaacattgaaagcttcttcttgtttctctccccatttgaaaccaacatttttcttgagcacttcattgagaggtgct

SEQ ID NO: 17766 - DNA, 382 bp, Glycine max
tcttggcaatcctcattccagcgatcagtttggtttttgcgtaagagtttgaacaacggctcacaaatggcggtgagctgcgatatgaatctggcaatataattcaagcgtcccaggaaacctcggacttgcctctctgtacggagttctggcatctcaaggatagccttcaccttttcggggtctacctctatccctttctggcttacaacgaaaccaagcaatttccctgatttgaccgcaaaggtacacttagcggggttcaaccttaattgatatttcttaagcctttcgaacaacttccgctggttgacaaggtgttcttcctcggatttagatttagcaattatgtcgtccacgtagacctcgatctcttgatgca

SEQ ID NO: 17767 - DNA, 383 bp, Glycine max
agcttgccacttaccagtagaaatggagcataaagcataatgggctttgaagtttttaaattttgatgaggctctatcaggggagaaaaggaagctgcaactcttggagttggaagaaatgagactaaatgcatgagtccttcaaattgtacaaagaaaaagtgaaggcttatcatgacaagaagctgctaaagaaatacttccgatcgggtcaacaagttctattattcaactcaagattaaagctgtttctaggcaagttaaaatctaaatggtctagaccattcaccatcaaggaggtcaagccttatggagcagtggaattatttgaccctcaatcagaaacttcagatagaagctggacagtaaatggccagagattg

SEQ ID NO: 17768 - DNA, 358 bp, Glycine max
tctaaactttatacaagaatgaagctctgataccacttgttagacaagtggcctcagatatcttaagaagggggggttgaattaagatattccaaactacttccccaattaaaaatctatttcactttttattcaagttataaattaccttaataatgaacttcttaaatattgattcaaataaaacaatttgaatataaatataaagcaataataaacaaaggagattaagggaagagaaagtgcaaactcagatttatactggttcggccacacccttgtgcctacatccagtccccaagcaacccgcttgagagttccactatcttgtaaattccttttacaagttctaaacaca

SEQ ID NO: 17769 - DNA, 409 bp, Glycine max
  unsure at all n locations
ntctctttccctatatattccccttctccttcacctttacctccccaatctgtttctgtacctattaaccagccaaacactaaccacacctcctctgcacccactcctcgtagaactgacagaattcaaactagacccaccaaatacattgactatcaaaccagtttcacatcagccattgttaccaatcatccaggcactaaacaccctatttcttctgtgatttcctataacaagctctcttcatcttatcacagcttcattcttaatgtctctgctaattctgagcctaagtcttataatgaagcctgtaaacatgattcttgggttcaagctatgcatgatgaaatttctgctctagagaggaataatacatgggtgctcactgatttacctcaacataaaaatg

SEQ ID NO: 17770 - DNA, 371 bp, Glycine max
agcttatgctgcaaacatttacaacagacctcctcaacctcagcagcaaaatcaaccacagcagaacaattatgacctctccagcaacagatacaatcccggatggaggaatcaccctaatctcagatggtctagccctcaacaacaacaacagcagcctgctccttcctttcaaaatgatgctggcctaagcaagccatacattcctccaccaatccaacaacagcaacagccccagaaacaacaaacagttgaggctcctccgcaaccttccctcgaagaacttgtgaggcaaatgactatgcagaacatgtagtttcaacaagagaacagagcctccattcagagcttaactcgccagatgggacaat

SEQ ID NO: 17771 - DNA, 400 bp, Glycine max
  unsure at all n locations
cagctntttgaatcaaagattctaattatgattgatacaaatacatatttatacactaaaatctttaagtctttgcataataagaatgtgtttggatgagagaatttaaaattttgaaaaatttaaaattctaataatttcaaatacttcaactgaaattcttttattttcaaatttttgtgtttggataaaaaaattaaatttgtgagagagaaagaaaatgagtcgcgagtttgagaaagagatttcgaaaacttttatgttggaagagaagatgaatgtttgttataaaggaaatacagaaactttntagaaggaaattaaaatttcacatttttggttgttaaaattctgttttaaaattccaaaaatttaaattcttcataaaaaatatccaaat

SEQ ID NO: 17772 - DNA, 366 bp, Glycine max
agcttcaatttacaaccatattgttgaagctgttaataaagatgaaggtggtatggtttttctctatggatatggaggtacaggaaaaacatacatttggaaaacacttgcaagttcactgagagctgacaataaaattgtcataatggtagcctttagcgccatagcgtctctgctattgtcttgatgtaaaactgcatattcacaatttaaaattccagattgagtttttgaagactcaacttgcaagatccatcatggaactcaattagctgaactattaactcagacaagtctgatcatttgggatgaagcacgcatggatcacatattcagtgatgaagcacttgatcacagtcttagaga

SEQ ID NO: 17773 - DNA, 381 bp, Glycine max
agcttcaacattcatattttgagcgtctcgtaattttacgggactcaatcagacatccgagtaaaaatttattgtcgcttggattggctcatagattcaacattcaatttcgagcgtctcgatatattacgggcctcaatcagacatccgagtaaaaagttattgtcgtttgaattggctcagagcttcaacattcaatttcgagcgtctcgatatatgaccggactcaatcagacatccgagtaaaaagttattgtcgtttgaattggctcaaagcttcaacattcaattttgagcgtctcgttatattacgggactcaatcatacatccgagtaaaaaggtattgtcgtttggattggctcagagattctacattcaat

SEQ ID NO: 17774 - DNA, 402 bp, Glycine max
  unsure at all n locations
ttgagcaaattcaggcgacaatatctttttactcgtatgtctgattgagtcccgtcatataacgagacgctcgaaattgaatgttgaagctctgagccaattcaaacgacaataactttttactcggatgtctgattgaatcctgtcatatatcgagacgctcgaaattgaatgttgaacctctgagcgaattcaaacgacaataactttttactcagatgtctgatatagtctcgtaatatatcgagacgctcgaaattgaatgttgaagctctgagcaaattcaaacgacaantaacttttactcggatgtctgattgagtcccgtcatacatcgagacgctcaaaattgaatgttgaagctctgaggaaattctaacgacaataactttttactcggat

SEQ ID NO: 17775 - DNA, 363 bp, Glycine max
tgtcttgcaagtttgaagacaccttggagaagttcatgcaagcctcattgactaataagaagaatagtgaggcttcaattaaaaacctagaaactttggtaggccaactaccaaggcaactaatagaccattttggaggttgattttgagaaaacacctaatgaaatcctaaggagcgttggaaggctattaatacaagaagtggaaggattattgggagtggtgtcgatgataacttggctaaagacgatcaagtggatggaggcaagttgtacaagggtaagaaaaatgatagtgagagtgaagaggaatccaattaaaaagatagagtgtatagagaataagactcataatatgagggtg

SEQ ID NO: 17776 - DNA, 380 bp, Glycine max
agctttggagattttcagtgccaattcgccttcttctttcgtccagtcttcttctggcttcaattcatcagtgggctatccttctgtgtccagcatcttgggatgttcccagcctttgatgacagctttccaggttctgctatccagtgattagaggaaggccaccattcttgctttccagtattcatagttggttccatcaagaattggtggtctgttcactggtcctccttctttctccatgttcatcagattttatctccctaaatctcactctgagatttcgagcgttggctctgcatccaattgaaattctgatactggggacagatgtcgtacaggatgccacgacttcacgcttcataacactcagattgtat

SEQ ID NO: 17777 - DNA, 368 bp, Glycine max
agcttacatgggtttctagaagtccaaagcagatgacggacacctgttaatcacataggcaaccgctgtgcgcagcttccccccacatggaccttggcaggccagcactgagcaacatgcaccacactttatccaatacggacctaaacatacggtcagcacaaccattatgctgaggtgtgcgaaggactgtcaagtgccttaagatactcactttccctgcaaaacacattgaattgctctgaaacagactacaggccattgtcattgcttaaaactgataatatagcaccaagttgatttccaataagaggacgccactctctacatctttgaaaagcttctgacttatctttcaaaacatacaa

SEQ ID NO: 17778 - DNA, 380 bp, Glycine max
agcttgtatccatggcttcctatggtggtgagcttgttcttgactcatcttctccttgaagtggcatctccaatcacctttccttcttttccattccgttgtcattgatcttcaagaagcaaagggctctattgatgaagaagatccaatgcttacaagctctatatggagctacatcagtttatgagatataggttgaagttgtgtataatatttgattgatatcattttttgggggatcaaggatatcatgcatatgttacaatttagatgcaaacaaaatttgcatagactaaccacccaatttgggtgttgcaacaacattatgaactaaaagagaaaaatgtccaacaataaaaattacctttgaagtaagggtc

SEQ ID NO: 17779 - DNA, 399 bp, Glycine max
tgtcttcaacaaacaaatcaaaatctattttctgattttcattacctagctccagcttcctctcccccatatcaactatgcagcttgcggtcaacatgaatggccttcccaatattacaaggatgtcagtatcttcagagatatccattaccacaaagtctgtcgggaagataaaatgttttactctgaccaaaacatcttcaattactccatatggcctggtaatggagcagtaagctaattgtaaagtcattcgagtgggcattatttccaactcttccaatcttctgcacatggagagtggcatcaaattgatactggctcccaggccaataagagcttttcccacattgacttctccaattgaacaaggaatcgttacactcccaagatctttat

SEQ ID NO: 17780 - DNA, 315 bp, Glycine max
atcttttaccaaagggagatggaccatttcaagtgcccgaaagaatcaacgacaacgcttacaaagctgagctgccccgagagtataaagataactccaccctcaatgactcagaataatctctttttgatgcagacggagaatccgatttgaggacaaatcctcctcaagagggagagaatgacgatgacatgttcaagagcaagggcaaggatccacttgaaggacttggaggacctatgacaagggctacagcaaagaaagccaatgaagctcttcaacaagcgcttgccatactatatgaatacaagccca

SEQ ID NO: 17781 - DNA, 409 bp, Glycine max
  unsure at all n locations
taacagtagttagacccatatgaatcccggggcaacctcttcgaccgtttccaaatggtataactcgaaagtcacttccacgaatgtcaacattgcaattctcaaatctctttggatcaaacatcaaaggattatgccaaactttaggatctctccctattgcccatgcatttactatgatccttgattttttctttatgaaataaccatcaatagtaacatcttctcgactctcacgaggtacgagcaacggtgcaaccgggtgtaatcgtagcgtctccttcaccaccatattcaagtaagccagttnttctaagtcaatttcctccacgtgtctgttcatccccactacattntctagctcatcttgaagtctcttcatcacactttgatgcctcaagagttctga

SEQ ID NO: 17782 - DNA, 347 bp, Glycine max
tgtccttcctagataacgtagtgccacacgagcactgttcacttgggatagtccccacagtgcttctcgggtgtcctcaaatcagaaagcacagagaactgtctctggttgcacctattgcacatatacatcttggggcagaggctcctcttgtaatggatctcggcacaaatcattgacttcaaaggttggaactcggcatgcctttggttccatctacacccttgttgagggcacgaatatctctttgtcacactatcttctgcacctaaaaacaacacattactctcctttctgtgcttttcttcatgggatgcgcaaagctgcacttgttttgactcttccca

SEQ ID NO: 17783 - DNA, 362 bp, Glycine max
agcttaataagaggcatgctaagtgggtagagtttttagagcaatttccatacgtcatcaaacataaaaaggggaaagggaatgtagtggctgatgcactgtctaagagacatgctttacttgctatgcttgaaactaaactgtttggtctcgagtctttgaaagacatgtatgtgcatgatgtggactttgctgaaaattttgctgcatgtgaaaagttttctgaaaatggttactataggcataatggattcttgtttaaagcaaataaattatgtgtgcctaagtgttccattagagagttgcttgtgagtgaatcccatgaggggggttgatgggacactttgggattaaaagaccct

SEQ ID NO: 17784 - DNA, 329 bp, Glycine max
tctcgatatattatgcacctgaatcagactttcgttttataagtgatgaccatttgaatttgtggagagcttccgttgtgcaattttgagcgtctcgatatattatgcgcctgaattggacttccgtgtgattagttatgaccatttgaatttctcgagagcttacgttgttcaatatcgagcgtctcggtatataatgcgcctgaatctgacttccgtgtgacaagttatgaccatttgaatttctccagagcgtccgtttgttcatatctagcttttctatttattatgcgcctggattagactttcgtgtgatatgctatgaccat

SEQ ID NO: 17785 - DNA, 369 bp, Glycine max
  unsure at all n locations
tgtagaacggctggtcatgatatatgtcagggtttggtcagcgggtcggcgataatggggatgtcctacattatttccatgatacacatgcaacaatgatgattaggaaattttatgcaaaactggtcatgcatgcacccatgtggacactcaagcataaagtttttatggtcatgtgacactagggctcaagattcattntccctatttaagtcaacccagtgtttccaaaatatgctcttttatcaatttatgcattcatccgagtcccttttgtgcgttcgggaaaattttcacagtattcaccctttacgtgtatacacattctttttttcaaacaaactggttatgatagtgaaatcattttca

SEQ ID NO: 17786 - DNA, 371 bp, Glycine max
agcttttgtgttctgagaatagttacgtcacaactcgagtgatggggacatttgggttagtatgattaagctaagcattctcctatctctcttaccaaattataattagttcaagttcctgtatgattgcaatgtgtaagtggtccctaatgtttaaaggtcaaaagatattgattctctccttttttctttttctgtagttatgttgcaccagaatatgcatgcactggaatgctgactgagaagagtgatatttatagctttgggatacttatcatggagataatcaccggaagaagtcctgttgattatagtagaccgcaaggagaggttagaggccctcaccaataaaagaccatagttaacattta

SEQ ID NO: 17787 - DNA, 368 bp, Glycine max
agtttggtcaaaggtaaggttagcttagaaaaaccctctatgaacctacgacagtaacctgctaaaccaaggaaactcctaatctcaaacactaacttatgactctcccaactcatcaccacctctaccttggaaggatctactgctatccctcccctagatataacatgccctatgaagctcaccttctctagccaaaactcatactcgtacaacttagcatgtagtctgttgtgcttgagggtttgcaacacaaccctcagacgctcctcatgttcctcccttgtcttggaatacaccaagatatcatctatgaagaccactacaaaactatctagatagggatgaaagatcctattcatgtagtc

SEQ ID NO: 17788 - DNA, 368 bp, Glycine max
agctttaagcgtctttttgctaacgaagacgacgcaaaagacctaacatggcatgcaaatggaaggatttctgatggaatcgtctgtcatccggctgattgctcccagtggaagaagattgatggtttgtatccggatttcgggaatgagccaagaaatcttagacttggactagccagtgatggaatgaatccatatggaaccttaagcactcaacacaattcatggtcagttctgctagtaatttacaatttgcctccttggttgtgcatgaaacgaaaatacatgatgttgtctatgatgatatcgggtccaagacagccaggaaatgacattgatgtttatctaagttcgttgattgaagacct

SEQ ID NO: 17789 - DNA, 436 bp, Glycine max
  unsure at all n locations
taagccaaaactaatagtgcctgccaagtatctgagtaatcctttntattgctgcccaatgctgttcagtgggatctgacataaattgacagaccttgttggccaagaaactaatttcagttctggtgatggttgcatactgcaaagcacccacaacagatctgtatagagtgggatcagaaaaagactcataccctgatttggttaacttgcagccaccaaccattggagaggagatggaattagcttcatccatcttggttttagtcaacagatctcttgtatacttggactgagttagaataagagcacattaggctgaggtctgacttcaatacccagaaaataatccagattacctaaatcctttatagaaaactcagaattaagtntagtaaccaggatttaatgaaattaggattgttgcctgtgacag

SEQ ID NO: 17790 - DNA, 404 bp, Glycine max
  unsure at all n locations
gcttcgcactcgataccggagaacacatgaacattgctattcaatgacattcatggtgctgcgaacaaatgtggagtatggaggattgccttgagggtcctcacttacgcggtcgtgagactgagctcgccactcgagagtggaggacacattaacagccctagacaatagcattcatgtggctctggaaaaggaacagaatggaggattgccttgaggttcctctcttangaaatcatggaatacaactccaatactcgaatatggagaacacatgaacaggcctaagcaataacaatcatgtggctccggaaaaggacgataatggaggattgccttgacgttcctctcttacgcaatcatggaatacagatgcagactccaaaatggacgaccctgaatga

SEQ ID NO: 17791 - DNA, 367 bp, Glycine max
gtggcgttattcttaggtggaagatcaagcttgtattagtgccacaaaccgcgactgttttcacagtgaccaagaccttacaacaaggatggagcacgcttcttcatagatggcagcaagtggctccacatattgatgagaatctcttcattagagttatcattcaaccagggaatggcactgttcctggcaagagaacagtaacaacttcttacaatgctctctttcttggtggtgctaatacgcttctccaagtgatgaaccatggttttcctgagttaaggttgacaagaaaggattgagtggagactactgggatcgaatctgtgctatatattgctggctaccctgatggaacaggcccaga

SEQ ID NO: 17792 - DNA, 430 bp, Glycine max
  unsure at all n locations
tagtgtagttcttgaaagagtgcaccacgcacttgctcctcaatggtgtgcgcgctctgcacatcgtagtggtcggagaggaacagttctttcgcaccatggaactgtctccgaccaccaatcgactcttccggcctgtagtaccacctcacacgcaccttcacgttgttcctattatcctgctcgatcatctccacgcgcgccacgtaagggggcttcgacgtgtccgagggccgcatcagaacacagtctccagctgcaaaacccaaacattttcttaaacgatagctctcgctcttcaaaacgacatcagcatcatcatcatcatcgtgggcagccacaaaaacagggaaagggaccgtcttttaacgagacaacgcanaagggttggcgtgtgttacctcggacgatcttgttggttcctcttatg

SEQ ID NO: 17793 - DNA, 436 bp, Glycine max
tgtcggtgtacctaaagatgctattaggctcagcctgtttttattttctctatctggggaggccaagagatggctgcattcattcaagggcaatagtttaaagacctgagatgaggttgttgagaactttctaacaaaatatttcccagagtctaaaactgcaaagggaaaacttgcaatttcttcattccataagtttccccatgaatctttgagtgaggcattataaagctatagaaaactctaactcatggtttttcagagcctattcagctgaacatcttcattgatgggttacggctgtagtcaaagcagttactcgacgcttctataggaggaaaaattaagttgaagacacctgaagaagccatggacttaattgaaaatatggctgtcagtgaccatgcaattctgcatgatatagttcatattccta

SEQ ID NO: 17794 - DNA, 417 bp, Glycine max
ctttgcaagctggaatcatttatcctatctccgatgttaatgggtgagtcccgtccaggtagtcccgaagaagaccggcctcacagtgataaaaaatgagaaggaagagttgattcctactcgggtgcagaacagttggagagtctgcattgactacaggaggctgaaccaggttaccaaaaaggaccattttcccctgccattcattgatcagatgcttgaacgcctggcaggtaaatctcactactgtttccttgatggtttttctggttatatgcaaattactattgctcctgaggatcaggaaaagaccacattcacctgcccctttggcacttttgcttataggaggatgcctttcggcctgtgcaatgcccctggtaccttccagcggtgcatgattagtattttcagtga

SEQ ID NO: 17795 - DNA, 352 bp, Glycine max
atcttatgctgcaaacatttataatagacatcctcagcagcaaaacaaacaatagtagaataattatgacctttcaagcaatagatacaatccaagttggaggaatcatccaaatctgagatggacaagtcctccacaacaacaagagcctgtccctccttttcagaatgctactagtccaaccaagccatatgttcctcctccaatacagcaacagcaacaacaacagtcacaacaaagacaacaagcaactgaggctcctcctcaaccttccttacaagagttagtgaggaaaacgacaatccagaatatgcaatttcagcaagagacaagagcctccattcagagtctg

SEQ ID NO: 17796 - DNA, 432 bp, Glycine max
ttgatggtgtcgagaagaaatcacatgtttgtcattattttaagggggagaatgtgaatgtatgtatacatgattttgatgatttcaaagaacaatctaacaaggctgcttcaaatgataaacatttgcttcaagaataattcaagattgcttcaacaaacaaagccttgtttcaagattcactaaagaccaagccttgccttaaaacaaagtgctttcaagacatgcaacgctctggtaatcgattaccaggaagtgtaatcgataaccagaagacaggattgagaaatagctgttgaaaaaggtgaatttaaattttcaacatgtaatcgattgccatatgtgtgtaatcgattaccagcaacagaactttggaaattcaaattcacaagtcataacccttcaaactataactgtgtaatcgattacaca

SEQ ID NO: 17797 - DNA, 406 bp, Glycine max
tgcatacaagattcttcctgtctgacacttttaatgtttgtggccgggtcatataaatgccttcctatacatccctatgcgagaatgcagttgtaacagctaactgctccacgtgaagattgtctaccgctattatgcttagaatagccctgatggtggtcatctttacaactggagagaagatttctgcgatgtcaattacttgtttctggtgagaccctttgaccacaagattcgacttgtgtcttcttgtaccgtcagatggttactttagcctatatacccacctagttggtcatgccttctttccttctggctatttatttaaagaccacgctttattgttgatgacggatggcatgtcatctgtcatcgctagcttccactcgagaatgacattcccctg

SEQ ID NO: 17798 - DNA, 350 bp, Glycine max
agcttttcttcgtgggttggcgggttctgtctcgtagaatggcatgatcattggctgacatgttctcaattagctctgttgcttctttcggggtcttcagttttatctttccccctacagaagcatctaacagttgcttggtttgtggtctcagcctatctataaacatattcaattggattggctcggaaaacccatgagtgggagtttttcttaacaagcctctgaatctctccaatgcttcactcagagattcattacgaaactgatgaaatgaagagattgcagctttcccttctacagtcttggactctgggaagtatttctttaggaacttttcaacaacttct

SEQ ID NO: 17799 - DNA, 422 bp, Glycine max
  unsure at all n locations
agatgattcaacttttcttctctagggacaacaagtcgaaccagttatcaagtcccatcaacttcagcgattcgtcgtaaatccccagattccactccgcttcctctctaaagatgatcgtcacgctggcattgagaatccagcttatgaaacttgggagcaacaggatcaagtgctcctcacatggcttcaatcgactctctctacgttgattttatcacgagttctaggatgcacccactcctatgaggtttgggaatgcattcacgattatttccacaagcaaacaatagccacagctagtcaacttcgcactcaactntgtgctatgacacttgcaggcaactcaatacgtgaatttctgtcacagattcgagcaatttctgattctctagcttctgttggaagccggattatgcttc

SEQ ID NO: 17800 - DNA, 374 bp, Glycine max
  unsure at all n locations
cgctttcaagtcttttagtctcagaggatgcagctgagtgtgcagctacctcatgcactcctctaatgactatggcatcatttctggcactaaactgctgagagttggaagccatcttctcaattaaatttctggcttcagcaagagtcatgtctccaagggctccaccactggcagcatctatcatacttctctacatattactgagtccttcataaaaatatcggagaagctgctccgaaatctgaaggtgagggcacctggcacatagttttttaaatcgctcccagtactcatacagactctctccactgagttntctaatacttgagatacctttcctgatggctgtggtcctggaagcagggaaaaaa

SEQ ID NO: 17801 - DNA, 430 bp, Glycine max
  unsure at all n locations
tgtaatcgattacacacatactgtaatcgattaccttatgagattttcagaaaatattctcaacagtcacatcttttcatttggttcttgaatggtcatcaaaggcctatatatatgtgacttgagacacgaatttgctaagagtttttctgaacaacaagtgtttattctctcaaaaagcaaaatcgttttatcctcttaagaattccttggccaattcaattgcaattcattaaggaatcatttgagtgctcagattgtaaaatctatctcttcaagagagattcattcttcttctctttctaattcactaagggattaagagaccgagggtctcttgttgtaaaagaattctaaacacaaaggaaggattntccttgtgtgtttagaacttgtaaaaggaatttacaagatagtggaactctcaagc

SEQ ID NO: 17802 - DNA, 366 bp, Glycine max
agctttgctcatatttctcattctagacaaacttctcatttttacgggttagtttagttaggggtagtgctaatttagaaaatcccttaatgaatttcctataatagccagccaaccccaagaaacttcgaacttctgttggagttgtcagttgttgccactccataaccgattccactttagccgggtccatcgcaaccccgtctttagaaatcacgtgccccaggaactgcaccttctctaaccaaaatttgtatttcgacagtttggcgaacaatttcctatccctcaggatctgtaacaccatcctcaagtgcttttaatgctcctccttattcctcgagtacactaggatatcatcaatga

SEQ ID NO: 17803 - DNA, 378 bp, Glycine max
  unsure at all n locations
tntctttttcttcttntttttcctttctttntttttcaaactttcatttgttctaacaatcccccacttgaaatttgaaaagaagattttcgaggatttcataaaattgtgcataaacaaaggtgtcatacaacttgaacctttgcatagtgagtaagattcagattttattagagtgactcgaagtcttgaactctatctccgacatcaaaccacacacaaccttttcataggtgtattctataaagcccgtgcgttaaagaccatgcacgtctatcccggtatagtgaacgctctaganatntttgcccaaaatttcatatgaagcggcccccactttaacattcacataggtgagtctatcaagagtactcctgt

SEQ ID NO: 17804 - DNA, 372 bp, Glycine max
  unsure at all n locations
agcttaatatttctatatatggcttaaaacaggcctcccctcagtggtaccttaagtttcattggataatttcttcatttggttttgatgaaaatccataccacaagattagtgggagtaaaatatgatttcttgttttatatgtagatgatattttacttgcagccaatgatcggggtttgctacatgaggtgaaacaatttatctctaagaattttggcatggaggatataggtgatgcatcttacgtcattgacattaagattcatacatatagagctcgaggtattttaggtttatcacaggaaacctatattaacaaaattttagagagattntggatgaaagattgtttaccaagtgttgctccca

SEQ ID NO: 17805 - DNA, 366 bp, Glycine max
attttcctctaccacctcattaagaatcaaagtgccatgaagaatatgtctgtctttaatgaaagctgtttgtctttcatcaattaaggcaggtataacctgtctcaacctgcttgctagaagcttagctatcactttgtacatgcagcctatcaaggatattggtctataatcatttagggactgaggatggttaactttggggataagagccaagaaagaggcattgctgcctctagggaaacaaccgttgacatggaactcatccacaaatcttctgaactctggttttagcacactccagaattccttaataaaattgaaattaaaaccgtccggcccagggcacttatctccaccacaact

SEQ ID NO: 17806 - DNA, 423 bp, Glycine max
  unsure at all n locations
ttctttatcgttggaactccagtatctttcatttgatctttggatngattggttaaatgtgttgtctcttatttaacccttcttttattatattgttatgttagcatatttgtgcaacatcatcgttaacctatcacaacaataatttttattaaaaaattgacaatatattaatagtgaactaaaattattaaaattttaaaatgtgagagatcaaatgtaaatgtgtagtataatatttgaataatcaaaattacacaatcataaaattacaaagagttttttaaacctattatgtattcaaaattaaagaataatattaaaaaatgttataatttactatactctattatgcacttcttctattttaaaataaaatataaacgtaaaaaaaacaacataatttgatacataacgtaataa

SEQ ID NO: 17807 - DNA, 370 bp, Glycine max
agctttgcttctacagggaagacttatctttggacttcatagggggattgtcgacccttaagggcaatacagtggtgctggtcgtagtggacaggttctctaaaggaatccattagggttcgctcccttcacatcacacaacattcaatggtgctcatctttttatggagatcgtgggaaaacttcatgggatcccccacagtttagtctccggtcgagacccattattcatcagccgcttgtggcaagagttgttccgattgagtggctcgaaacttcatatgagttcagcctatcacccgcaatccgacgggcagattgaggtgatgaacacggtggttgagcaatatcttcgagcatttgtgcactc

SEQ ID NO: 17808 - DNA, 364 bp, Glycine max
gaaaacaaattgagatggtgagatcagatagaggtggggagtactatggtagatacacagaggatggacaagcaccaggttcatttgcgaaatttcttcaagaacatgggattgttgcccaatacactatgcctggttctccagatcagaatggtgtggcagaacgaagaaatcgaaccttattagacatggtgagaagcatgaagagtaatgtaaagcttcctcaatttttgtggattgatgctcttaagacggctgcatatatattaaaccgagttctaaccgaggctgtctcaaagacaccttttgagttattcaaggattgaaaaccaagtttgcgacatatacgcgtttggagatgctc

SEQ ID NO: 17809 - DNA, 374 bp, Glycine max
tttcaagtttgatgtttaaagcgagaagtacgtgtttgtgggttacgactcaagatccaagggatacaaactctataatccaaatagtagaaagatcatcataagtcgcgacgtagagttcgatgaagaagattgatgggattggagtgttcaagaagataagtatgattatcttccttattttgaagaagatgatgaaattgaacaaccaatcatagaggaacatattacaccacctgcctcaccgacaccaaggctggatgaaacatgttcaagtgagaggacaccgcgactaaggagcattgaagagatttatgaggtaaccacaaacctaaacgacattaacctctcttgtctttgtggtgattgtgagc

SEQ ID NO: 17810 - DNA, 421 bp, Glycine max
tgcaagtgtaatcgaattacttgacttatttacgcttcacaaagaataggttgccctagaatcaaaaggtaaggtcaaaagagtattctttatgaaatatatcttgatatgagtcatcgaactatagcgtattagcatcactaagaacaagaaatgacaaacaaccatactatctatgcaattaaggcaaaacaccatactacaagtgatgtagctccatgtggagcttgcaggtcttgaatcttcttcatcaatggagtcctttacttcttgaagaccatggcagtgaaatggaaaaggaagaaagatgattggagatgccacatcaaggagaagatgagtcaagaagaagctcaccaccatagtaagccatggataagagcttgaatgtaggagaagaatagtggagggagagggagag

SEQ ID NO: 17811 - DNA, 333 bp, Glycine max
tgtctggaccacaagtgatagtatttacctgtctgtctcttaaagcctcaacaaaacaaggtgtgtatctgacttcagtatcacctatccccagttggccattttcacctctgccccatgagtagacactccccccagaagtcaaaacagcaacatggtatgaaccgtttgatatcaccttaacaaactcttgtttgagatgttcttcagacatgactgctttatccgtgtcatgtggatttactagttgtgcatatttggcacttgccattgcaaaaaccttgccgatgttagagagagctacagtcgacattcttacacatgacacttgaa

SEQ ID NO: 17812 - DNA, 435 bp, Glycine max
gccacagggagaaagatgtccaaaaaatgaaatatttaattatataaaatcaactccctcttgttgtgtgtaacccttggccacaagcctagctttgtaactttggatggcgccattaacacaatgtttgatgtgataaacccacctataaccaattgaaacttagcttggggaaaatcagttagatacgaagtatgatttgcttcaagagtatgtaattcatccttcatagcttttcttaatacagtttcatacttaacagcttatgcatatgttttgggttcagaaatttttgaaatggctaaggtatatatttgagatgactaggagacaaatgatgataggacagaacagtggataaagaatataaagcagtacctgaagtagaagaaaggaacctgctgagttgagaagattgcatgtagtgaaaaatga

SEQ ID NO: 17813 - DNA, 369 bp, Glycine max
agttttttccttctcgacacgtatactctgaaccacaagagcaagagctcatgtttgatcatcacatgggtatagaatataaaaaagtattcacaaattttattatattatagtagatttcaaatttaaatttatctttttttttctttctctcttaattgtatattttgttatataatttatcgtataagtataatttctctcatgcaaaacaaaattttcttacgtacactaagtttgcggagttatataatatgatttatttaccattaaattcaatataaattgtttatcatatatacgtcagaaatatttatttattatgaatgttaatactactataatttatatatattaaaattattctta

SEQ ID NO: 17814 - DNA, 418 bp, Glycine max
  unsure at all n locations
nttcctctggttgttctactggggtttccaagagttatagttatatgagaagaaattgaagccttcattttgtattgtctttgtgcgattcacttttctctctccatgaataatactttgcaaatcccaatggtaaaggtgtgcgcaactgaatcttgaaccaagtatctcaatttcatgatgatcgaacggttaatgagtccgggatcatagatttactaggtaggttctgagtctctgtggaaaaagagaaatctacaatgcgaacgacatttctctaagctccaacattctttcgcaatttccaacggagaaaatgctcagaaattagtttccgaccaggtgctgagatatcacgacgatccaacgatcaaagaatctgagatcatcatttctactaaaatagatttgagcgtat

SEQ ID NO: 17815 - DNA, 354 bp, Glycine max
gctttgtattttagcctagaggcagcgaggcacttgtccattaagaatgaataaaagtaatgttccttttgctttaatccattctgaggtatggggggcatccccaaaatattctatctctggctatcgcaggttagcgatatttggtgatgagtgcactcgaatgacttggattaacttgttgaaacaaaaaaaatgacccggtacacatatttcaacaattccatacaatgattcagactcaatattcaaagaagattacgatccttcactctgataatggtggggagtttgctaatcaccaattccatgagtatttcgaaaaacaccgacttattcacgaatccacgtgtc

SEQ ID NO: 17816 - DNA, 151 bp, Glycine max
tgcatggaattccttccagtattgtatcagacaggtatccgaggttcacttcgcgattttggacaagtctacatgaagccttggggacaaagttgaagcttagttcagcttatcatcctcaaacagatggtcagactgaacgaaccattca

SEQ ID NO: 17817 - DNA, 348 bp, Glycine max
  unsure at all n locations
agtttgngcatcacaatactcctgattgacgatgtctccatatgttcttaaaactggactgattcatttgcttacacagttacatgggcttgcaggcgaagacccggacaaacatttgagggaatttcacattgtctgctccaccatgaaacccccagatgtcgaagaggatcacatatatctgaaggctatgactcactcattagacggagtggcggaagactggctgtattaccttgctccaaggtccatcacgagctgggatgaccgtaagagagtattgttataaaaaattttccctgcttccaggaccacatccatcaagaaggatatcttacgtattagact

SEQ ID NO: 17818 - DNA, 426 bp, Glycine max
caagctccttcaactgcacaaggctctattatttttgagtatccttgtggaaccttcacccgacgaagacactgacaaaaacttatcttctccttcttggacaaagtatggcatgctgagggcaagtaaattatcttaccatcacaccttggatgcaactgcaatcttatacccatatcagctagatcttgactggtattgaatccatcctaagctttgtcttgaatgttaaggaacattctaatcacactgtcacaaacatttttctacacatgcataacatcaatactctgtttaatgtctatatcacaccagtactgaagatcaaagaaaatggacctcttcttccatatgcatctctgacatttatgcttcttttagagcttcccaaatacagtgttcacagcgtgaacccgcatgatatac

SEQ ID NO: 17819 - DNA, 363 bp, Glycine max
atcttccttaagaagattccttaagaagctagagcttagctacacatacctctctaatagctaagctcacctccttgagatgagaagctagagcttagctacacaccccctataatagctaagctcacccccatgacaaaaaacatgaaaataacagaaaaaagtccttattacaaagacaactcaaaatgccccgaaatacaaggctaaaaccctatactactagaatggccaaaatacaaggcctagacgaaggaatagcctattttaatatttacaaagataagcgggctcatacttagcccatgggctcgaaatctaccctaaggctcatgagaaccctagggcctttccttggatctc

SEQ ID NO: 17820 - DNA, 375 bp, Glycine max
agcttgccctagttaagtttaggaaagtcattcattaaatgacagtacatttgtttcatgttttgctgttttacaaaaagagctaaaactactctgttgcacttcgtctacatatacctcaacattactatgcttaataaaatttggtgatcttagtaaaacataaagcactttctcaaatattaagatcaaataacattcagcgtatccaagagatgcagccaaaataaataatgagaacattaaaaaactgaattacctcacttaaaatgagaacccctttcttggatgcttgacacgcaacaaattcatagctgacaagattcattccatcccttacagatgtaacaagtgctacatctaaattcgatgtga

SEQ ID NO: 17821 - DNA, 423 bp, Glycine max
  unsure at all n locations
ntcaacatcagggttggggcagcagggacatgaatgtatccattctattccaattctctccttttgtctttttattagtattttttttaaattgaactaacattctatgctcttaagtttggcttcttttcatacttgtatataaatgtaaggtgtccctttcatacccccttttgtgttgcttggacatgcttgtgagttttttgttttccttttctctttttgataatttgattggacatgcttgtgagttttttgttttccttttctctttttgataatttgattgatgtgtgagcaatgatggttaggaggggagaagaagtgtctgaattctgagctatggcatgcatgcacgggccccttggtgtccctaccaactgcagggactcatgtggtttacttccctcaaggtcataatga

SEQ ID NO: 17822 - DNA, 360 bp, Glycine max
agtttgtaggttatagtgacgatgattgggctagaaatgaagatgatcaaaaaagtattagtggatttgtgtttttcatggggaatacgaccttcacttggatgtaaaaaagtactcgatagtcactcttttgacttgtgaggcagaatacgtagcagctacttcatgcgtttgtcctgtagtctggcttaggaatttgttaaaagagttggacatgtcacaagacgagcagaccaagacctttgtggataataagtcaaccattgctctagtaaagaacccagtgttccatgatcgaagcaaacatattgacactcgttaccactacataagatagtgcatagcaagaaaggatgtaca

SEQ ID NO: 17823 - DNA, 379 bp, Glycine max
  unsure at all n locations
ttaacttaattatattacacttgtttatgtatgtgtttatctcttgacttaaatataattttggtcattttattttactcaatacgtaattttggtctctctattttaaaattaaaatatttgatactcctatttttaaaaatctacaattttggtctctctattttaaaatacaaacattttgtccctatattttagaaaattcataattntgattctcatattatagaaaattcacaattttggtttaatatataatttctcctatgtttcatttcttttattttttactttgtagttaattaaatcatttcttgatgatatcttaaatgaatatgtagatttaggatttaattagaccaacacataagatataaaa

SEQ ID NO: 17824 - DNA, 371 bp, Glycine max
agcttgatccttacgagtcaacttggtcaaaggcaaggctaacttgaggaaaccttctatgaatctctagtaatatcccgctaaactgagtaaacttctaatttcatacacagatgactctcccacttaagaaaaacttcattttagaaagatctacagctatatcgccttgggatatcacatgtcctaggaaactaagtttccctaactaaaactcgcacctggaatcttagcttaaagttgtcagtccttaagggtttgcagcacaatcctcaagtgcttttcatgctcctctctagtcttggagtacaccagaatatcatctatgaattctaccacaaaattatctagataagggcgaacaatcttat

SEQ ID NO: 17825 - DNA, 423 bp, Glycine max
tcatgttgaagtatgtatggaaaaacttcattactgttgtttaacacatacaagtgagcttgtaacaaatcttcagacttggagttataacatgcagtcctcttcaacccttaccacccactctgtcgtcatggtaagacttatgaagcccaataggttttgccttttcaatgtactctgaacaaaactcaatggctttttcttcaatgtacctttcaacaatagaagcttccggacgatgtagattcttggtatacccttttaagatcttcatgtatcgctcaactgggtacatccgccgcaaataaataggaccccaacatttgatttctcagaccagatgaacaattaagtgaaccatgatgtcaaagaaagtaggaggaaaatacatctccaattggcataatgtaattgcagcctcat

SEQ ID NO: 17826 - DNA, 361 bp, Glycine max
atctttctatcaatgtgattaacaaccacaatttaattaattaattaattaacataacgaaatcagagccaggatacctaagattgatttgattcgtcgattaaatgactagattgttcaattcaaaaaggaatttactactactactactactacagaacgtatgaacttgaattgctagtacgatcctgaacgatgagaaataaatgataataagaaagaaagtaccttcggatcttgttgccctggccgacctggtacatgccccaagagaaagcgccgaatgtggtgaggaagatggcaacggcgctggggcccttgttcgggatgcgccgggcgaaccggaccggagcgaacccgc

SEQ ID NO: 17827 - DNA, 427 bp, Glycine max
tcaacattcaatatcgagcgtttcgatatattacgtgactgaaccagacatccgagtaaaaagttactgtagtttgaagttgctcggagcttcaacattcaatatcgagcgtttcgatatattacagaacagaatcggacatcagagtaaaaagttaatgtcgtttgaattatgtcagagcttcggtattccatttcgagcgtctcgatatattacgggactcagtcagacatccgagtaaaaagttactgtcgtttgaattttctcagagcttcgataatcaatttcgagtgtctcaatatattacgcgactcagtcagacaaccgagtaaaaagttattgtcgtttgaattatctcagagcttcggtattccatttcgagcgtctcgatatactacgggactcaatcagacatccgagtaaaatg

SEQ ID NO: 17828 - DNA, 360 bp, Glycine max
atgccagtaaaaagttactggtggctgaagttgctcagagcttccacattcaatatcgagcgtttcgagatatgacacaacaaaatcggacatcaaaatgaacagttaaggccatgcgaattatgtcacagcttccgtattccatttcgagcgtctcgatatattacgcgactcacacaaacatccgagtaaagacttactggcgtttgaattttctcagaacttccataatcaatttcgagtgtatcaatatattacgcgactcaggcagacaaccgagtagaaagtgattgtcgtttgaattatctcagagcttccgtattccattactagcgtctcgatatactacaggactcaatc

SEQ ID NO: 17829 - DNA, 403 bp, Glycine max
agtttgactatgttatgcaaattgtctcttatggccatgactaacaattgttgcatcaagatgtggcaatcatgagactttaagcctactaatttaagatctttcaactgcacttggctcttaatatttgaagagtatccttgtgggactttgacctgtcgtatacactgaaaaaaactgatcttctcctttctgggcaaagtatgacaagctggaggcaagtatattttttaccatcagaccttagatgtaactgcgatcgtatatccatctcagctagatcttgacaagtattcaaatcatctttcgtcttgccttgaatgttaagatgcgtcccaatgacactatcacatatatttttctccacatgcatatcattaatacaatgtctaacatctagatc

SEQ ID NO: 17830 - DNA, 233 bp, Glycine max
actcaagcttgtagaacaataaatcccaacacaccacatcactggttgtctcttaatctgtttgaaaaagagtattccttcttctcccttcttgcatcgtcaataacctcattgaccaccaaggtactatgaaaaagatacctatctttcaagaaggtgttttgcttttgatcaataactccatttaataccttcatcaacctattggcaagtaattttgccaatattttgta

SEQ ID NO: 17831 - DNA, 396 bp, Glycine max
agttttgagccaataccaacgaccataactttttactcggatgtctgattgaggctcgtaatatatcgagacgctcgaaattgaatgttgaagctctgagccaatacaaacgatactgactttttactcggatgtctgattgagtcccgtaacatatcgagacgctcgaaattgaatcttgaacttctgagctaattcaaacgacaataacgtttttctcggatgtctgactgagtcccgtaacatattgagacgctcgaaattgaatgttgaacctctgagctaattaaaacgacattaactttttactcagatgtctgattgagtcccgtaacttatcgagacgctcgaaattgaacgttgaagctctgagccaatacaaacgaccataacttt

SEQ ID NO: 17832 - DNA, 417 bp, Glycine max
caccaggtcgaggcaatatactatccccatttctgcttataaccttcatcttcattggtgtgctttcagaaacactagaagaggcagtaccatgaagtactcggtaactgtcttgattagatgaagttctaggaatggatcgagctgaaccataattacttctgtcctggtgttgagaagagttccttctgtcaaactcttttggacccttttcaacctttgtgagcacagaaatatctgatccactctcagatcctggatggcccaaaatgcctttcaattccatatagcctgttgaataattgggatcacccacaacatttggaaaggcaggcttcctgagattcaccctatctctcataaactcaagagcaaattcctcaccagtctgtatggagtaattaagtacaggtttat

SEQ ID NO: 17833 - DNA, 282 bp, Glycine max
tgttttatacccattatcacatctacaggaccaaggtccttcatatcaaaatttctagataagaaagacttcgcatcatcttcgaactacatatgatgatccagtatcggtatgtcatgcacatactaacatgacacgacgcattcattatcatcatgttgtgtcacatacacacatttatcagtgtgattgatttgaaaaccatacgagagaagaacttgatcaaattgttctgccactgctttgaagcttgattcaaactatgcatagattgaacaaatt

SEQ ID NO: 17834 - DNA, 403 bp, Glycine max
tcaagcttcctaataatgatgaacgactatcaacatagctcctatatatatatagtcttatctcatatagccctaatatcactaataactaatttttaacattctatcattcaaaagtatttctacagaaataatgaattaactttcaaatattttacgaccatattgtgaaattgtgtctaaaatctttatttcatcttctaaatcacaaaaatgataataaagttcaaaactaattgttaatcacgataagaatcacccatgagggaaaaaaaacctctataaaggtcatttacattaaaataaactcagagataatacagattattataaaagataaattctatattttaaaatcaaaaggaggtggcttaattggaatgcaaataagacacgactttac

SEQ ID NO: 17835 - DNA, 426 bp, Glycine max
tggcaagccagagtctcttcggctggctctttgcttgttcataatcagctgccggaataagtaggcaccaccattcaataccattatagagaatcaaataatatatatatcatcagaataaaattaaatattttctattgataggaattgtatataagcattaagaaatttataagacttccgcaccatacttaactaagttataagaaaacctattggatgctttttttttggtgataggaaatcggatgttgaagtttaaatgaaaaaaagtaaaactttctcatattattggttaggaacattaatggtgtaaattttaataaattacgacatacaacaacataaataataaaaaacacttgtaaaattatatcatacgctgagataatcaaattcgttgagataactaaaaaaacatagatt

SEQ ID NO: 17836 - DNA, 406 bp, Glycine max
  unsure at all n locations
agcttgctgcttcattgacagatttacttaaaaaagaagcattcaagtggacaccagaggcagagacaacatttgttcaattgcagaaagtcatgacttcagctccagtgttagctcttcctaatttccagctgcccttcattctggaaactaatgcttccgacactggtattggagtagtattacatcagaatggccatccaatagcatttttttccaagaaacttgcacctagagtgcaaaagatatctgactaatttagagagatgttagcaattgttgaagctatagctaagttcagacactacttgctgggacacaaatttattatcaaaactgatcaaaattagtcagatgatgatgttgatggatggaacaaccnctacagacacctgaacaacaacag

SEQ ID NO: 17837 - DNA, 411 bp, Glycine max
tgtgagaccttccgctacaatgttgaagagaaaaggtgcaaggtgatcaccttgccttagacctctcttaggagtaaactccttagatggactcccattaattaaaatggatatagttgcagtatttagacaaccatttattcatttcctccagctttcacaaaatcccatccttttaagcatgtagtcaagaaaaccccaagaaaccgagtcatatgcgttttcaaagtcggctgtgaagaccatgcaaggtttacttctagatttggcctcagctatagtctcattggcaattaaaacaccatgaagaatgtgtctccccttcataaaagctgtgtgcctttcatctataaggtgaggtaatacagcagccagcctcttggccaaaactcttgccataatttatagaca

SEQ ID NO: 17838 - DNA, 427 bp, Glycine max
tgagctcggcttgagttgaatacgtaattcttgagctcggcttgagttgaatacgtaaagcttgagttgacataggctttttttaaggctctgctcgacttacataaaagtctgacttacgagcctatttaaaagcttgcttaaagacgtcttttattaattaattattttaaaacctagtgaaatactaactaaaaaaagaaacttataaaatttcgtataaataatgtacaaatctaaaaataattgataaacaaaattatattgaattcaagtcgttaaagcacaaagtatataaaaaaaataaaaatagcataatattaaaaaatgtatggattagagatgatttacactaatatagccaaacaaaaattattattagttaaattaacaatttttaatccaatttttttaatatataattata

SEQ ID NO: 17839 - DNA, 399 bp, Glycine max
  unsure at all n locations
agtttttgcagcttcataaagcttttggactaattaaattaatactttcaaaattaaagataaatatttcatatatcatcatttttatatttttattattttaaaaatgaccataatatttttatgtaaattaaactagttttctaggtttttaaccataatatatgtatttttcaaaacttccatttcaaagaaaataatatttattattttaagttcaaaactcaaagaggaaaaaatgcatgcaaacaaattcaaataataagtattggctaaaatatttttattatgaaattaaattttttaaggataaataatttcattntttggaatatttgatattttgattnttatttgatccttanaagtaacattgtaacaataaaataatatttttca

SEQ ID NO: 17840 - DNA, 388 bp, Glycine max
  unsure at all n locations
agttttgagcaacttcaaacaacaacaactttttactcggatgtctgattgagacccgtaatatatccagacactcgaaattcaataccgaagctctgagcaaattcaaacgacaataagtttttactcgtatgttcgattgagtcccgtaatatatcgaaacgctcgaaattgaagaccgaagctctaagtaaattcaaacgacaataactttttactcggatgtctgattgagtcccgtaatatctcgagacgcgcggacttgaatgtcgaagctctgagcaaattcaaacgacaataactnttttcctcggatgtcgtattgagtcccgtaatatatcgagacactcgaaattgaatatcgaagctctgagcaaattcaaatgac

SEQ ID NO: 17841 - DNA, 408 bp, Glycine max
tcaacattcaatatcgagcgtttcgatatattactggactgaatcagacatcagagtaaaaagttattgtcgtttgaattatctcagagcttcggtattccagtccgagcgtctcgatatattacggcgctcaatcagacaaccgagtaaaaaagttattgtcgtttgaatttgctcaaggcttcggtaatcaatttcgagcgtctcaatatattacggaactcagtcagacaaccgagtaacaatttattgtagtttgaagttgctcagagcttcggcattcaagtcctagcgtctcgatatactacgggactcaatcagacatccgagcaaaaagttattgtcgtttgaatttgctcagagcttaggcattcaatatcgagcgtttcgatatattacgggactgaa

SEQ ID NO: 17842 - DNA, 406 bp, Glycine max
agtttgtaactttctcaaaactcctcaacattgccttaatgaccctcacattttgcattgatgcttcaccaaagaaaatggtatgatctgcatatcacaggatactaatttccactgagcttcttcccaccaagaggcctttaaactgattttttttagagcttctctcattagacccgttaatccctcagccacaatattgaacaggagtggggctaacagatccccttatctaagtcccttttgagggaaaaattcagctaaaggactcttattgatcaatatggagacaaaagctgatctaagacatcctttgacccaagtaatccacttagggtagaatcccatcctcctaagcatatataccagataatcctcactaactgaatcatgtgccttctcatag

SEQ ID NO: 17843 - DNA, 432 bp, Glycine max
  unsure at all n locations
ntgatttcctttgtttcggaaacctttcttttctcatgtgcactcaaacttaatctccgggttcgaagacaaccttctttctccctttgttggcttgtttagcatagcttttatttttcctctcaatttgatctttgactctctcatgaagcttcttcacatagtccgcctttgcttgaccttctttatgcttaaaaacagaaacattaggcataggcaaaagatcaagaggagttagtgggttaaaaccataaacaacttcaaaaggagaacaattaggggtgctatgaacagctctattgtaagcaaattcaacatggggtaaacaagcttcccaagtttttaagttcttcctcaaaactgtcctaagcaaagtttccaaagtcctattaacaacttctgtttgcccatcggtttgtgggtgacaagtgg

SEQ ID NO: 17844 - DNA, 404 bp, Glycine max
  unsure at all n locations
agcttcagaaacaaattcctattagccactgccttcaacttgcagaagcccactgaggtctgctgatggagttagctcatgcatttaggtaccatcaaaatatttaaaggtaacgggcaagaaaaaataatagcaactgtgtgtacattctctcaagccttctgaaatgcgcgggaagaaaccccatgcagaagcctgacaaatcccaagaaactaagctttccatctgagtgccttatccaatcctgaagtactacatgaacaggtactgatggactaagcccaagttcctgaaacgtgtcaattgtaaagagctcagtaccattatacatgtgatgaaggattatactatatgcatctgatagaaaatctcattagaggtatatctatcatgtngataaaat

SEQ ID NO: 17845 - DNA, 438 bp, Glycine max
  unsure at all n locations
ctcctatgcaaaaacatcaacagtgccgctgaacctgtctttgtttctctgttcattctatcacaaagacttaatcctcatgacagagaagcttaagggtaaagttcccttgaggttgttgaaggccaagtgcaaaacgtgcaagccagagataatattgaagaaatccgggagggagggagcctatgatgttggcagagttggcggagaagttctgaagtttggaagcttctcagagagtataaggaatctcccaagcctgatttttctgccctgaaagatttgcaagttttgagcttgagtcttaacaaactcactggtccagttccagcttctttgttgggtcttttgtggctcaaagttgtgaatntgaccagtaacttgtttcacgggccaatgtctgtgtttgctcattgngtcgaggtggataatgcccct

SEQ ID NO: 17846 - DNA, 397 bp, Glycine max
  unsure at all n locations
nttgttggtgtaaaagcaaggcgggtggagaagtattatcacgatctgctatcctcagaaagtgattctgaagttaaaactgatcagcaaagcatggagtcaactgacagtaatgggaaaacaggtgcagattttggacatatgccagaaaaatggaaaggagtcaaaagacagattgagaaggtatttgcttttgatatttcatccgtattgctcttaatactgtgatattattggtatgacactttaaacaagtttcttcttagtagtctattatcattgcttgtttgtgcaggatctgcctcgaacatttcctggtcatcctgctttggacgaggatggtagatatgctttgagacgattacttactgcatatgctcgacataacccctcagtt

SEQ ID NO: 17847 - DNA, 418 bp, Glycine max
  unsure at all n locations
tgactctagatcttgtcattggcccctttaactcattaagtgtttctaggtccttgtgctctttggatagccctctattagcattggtcagaatatcagccagttgatctatggcaggaacatgaacaacattgagttgtttggtgagaagtttctctcacacaaaaaataaatccagctccatatgcttggtttttgagtgaaaaacaggattatgagctaatgaaacaattctggtgttgtcacacaaaataataggagtagtgtaagctacttggagttcagaaagaagagactgaatccaagtaacttctgctgcaatacgagccatgcttctatantttgcctcaatactcgaccttgcaacaactgattgcttcttagaccaccaagagatgagtttatgtccaagaaaaat

SEQ ID NO: 17848 - DNA, 426 bp, Glycine max
  unsure at all n locations
taacatcgattntttgaagaactgatgttaagaaatgtgcggtggcattttcataaataagttgacttaattaacatcggttttttcaaaacccgatgttaacattgatttcttaatattggttttgaaaaattgatgttaacatcaagtagttaacatcggatattgaaacaccgatgttaactttagaaagttaacatcggtttttaaaagaaccgatgttaacattgacatgttaacattggttttgtttaagaaaccgattttgtctcattcataagttaaaaccccaaaatccattcccccccatgcgatcagttaccaaaatcctttctccctttcttcctcatcgctcacgctcgaaagacctatgtgtcctcctcactcaagctgccgctgaggttcgtgttcaggttcgcactggct

SEQ ID NO: 17849 - DNA, 315 bp, Glycine max
  unsure at all n locations
taagaaattgggcctggagttggagcggtgatgattttccggtgtgtcgcggcgacggtggaagttacggtggcatccacacgcggcgcacgttagcgagcgcggttcgttggggttggagaaagaggagggcatgaactcaccgcacccatcaagcgcgtggccaccaatgctggctgcatggtttttgaggcactctttgtaggcaaccgccgtagacggtggctgntgcggcggtgacacggtggtggggtggtgatggtgatggtccttgagggagccgttggtggtgaaaggttgtggtggggtatcgac

SEQ ID NO: 17850 - DNA, 387 bp, Glycine max
agcttcttagtctcggttgatgaagatgaattcatggctacttcatgcactcctctaatgacaatagcatcactcctggcactaaattgctgggagtttgaagccatcttctgaattaaatttctggcttcagcaggggtcatgtctccaagggctccaccattggcagcatctatcatacttctctccatgttactgagtccttcacaaaaatattggaggagaaactgctcagaaatttggtggtgagggcaaatagcacataattttttaaatctctcccagtattcatataggctctctcctctacgctgcctaatgcctgagatatcttttctgatgaatgtggtcctggaagcagggaacaatttttctaagaatactctc

SEQ ID NO: 17851 - DNA, 425 bp, Glycine max
  unsure at all n locations
tgaaagcaaactggatgcgttggtcaactnggtaacttaacttttcttgaatcagaaatctgtacctgtcgcaagggtttggggtttgtgctcctctgctgaccaccatacagacctttgcccttccatgccacaacctggagcaattgagcagcctggaacttatgctgcaaatatgtacaatagaccttctcaacctcagcagcaaaatcaaccacatgagagcaagtatgacctttccagcaacagatacaaccctggatggaggaatcaccctagccttagatggtccagccctcagcaacaacaacaacagcctgctccttccttacaaaatgctgctggcccaagcagaccatacattcctncaccaatccaacaacagcaacaacctcagaaacagccaacagttgatgcccctccac

SEQ ID NO: 17852 - DNA, 398 bp, Glycine max
  unsure at all n locations
agcttgtactttttggcctctagattagccaatcctgcagcacatcgtagctttgcaactgttactgcttcatgggcatctggtgcctgttctgccttgctaacatagcttgtaacatgagaaaattgacccatctcaatgctgaccagaattgcactcatacacatatgaataatgtgctttgatgtagtgcaataatcccgagtacggacataacttttaaaagcgtcccccaattgaccatgagcatagtaaaagtctccaaaatcattgaatcccatcctaatgctttccttaatcaagtttgtctgcaaaaaataaatgcgatgaacaaattgacaggataaggaatcaatgatanattacgaaaaaacaggtcttaccaaaatactcctcat

SEQ ID NO: 17853 - DNA, 433 bp, Glycine max
tatgcataatgaattagaagatgaccttctaatcagtggaaaaatgccgctgtccgacatctatcaaagatgtaatgtagcaatttatgaacttgctagctgtaaggaagcactaaaagatccaaaatggaaaattgcaatggaggaagagatgtctatgatacacaaaagaaaaacattggagctggttgaaaggcctgaagatagaaaaatcattagagttaaatggattttccgaacaaagctcaatgcagattcctcagtcaacaaacacaaagtgagacttgtggttaaagggtatgtacaaacttttggtattgattattctgatacttttgcacctgtgtccagattagatacaattcgattggtgttaatagtggcttcacaaaagggttggaaagtcttccaattagatgtcaaattagctttt

SEQ ID NO: 17854 - DNA, 419 bp, Glycine max
  unsure at all n locations
gaccaagtttccaacggaagcnggatttgatccttttagcttgncnctagacatggacaatgcattgatgtttgtcaagtatccaacagtggaaagaattgatccatgaagtttattaccactgagttgaagtgttctcaaattatccaagtctcctatggaagatgggattgacccaganaaatcattttttagcaatttgattattgtgagagaatgaagtcttcccaactcctcaggaatagggcctgagagaatgtttttaagatgataagttgttccaaatttgtcaagtttctaatagttgaagggattgcaccaaagagattgttggatgacacatcaagtttaacaagatttgtcaacataccaaatgttggcgggatgaaaccattacaaagattatgatccattttcaa

SEQ ID NO: 17855 - DNA, 384 bp, Glycine max
  unsure at all n locations
atcttntaactgaatttgcaacgttccaattgatttcaaaatggtgtaattgattacaatatattggtaatcgattaccagtgtatctgaacgttgaaattcaaaatcaattgtgaagagtcacatcctttcataaaatgctttgtgtaatcgattacatggttttggtaattgattaccagtgacaagttttgaataaaaatcaagagatgtaactctttcaatggttttcaggttcttctaaaggttataactcttctgatggttttacaaggttgaaaagacatctcaaggactgcangtcgcttggtgactggatgtatgcacggtttgttgccgaaccagtataaactctttgtgtttgtcttcttctaccctacactc

SEQ ID NO: 17856 - DNA, 416 bp, Glycine max
tctcgttatattatgcacctgaatcagacttccttttgaaaagttatgaccatttgaattcctcgagagcttccgttgttcaatttcgagcgtcttaatatattatgcacctgaatcggacttctgtgtgataagttatgaccatttgaatttctcgagagcattcgttgttcaattccaagcttctcgatatattgtgcacctgaatcggacttccgtttgaagagttatgaccttttgaatttctcgagagcttccgttgttcaatttcaagcttctcgatatattatgcaccttaatcggactttcgtgtgacaagttatgaccattttaatttctcaagagctttcgttgttcattttcgagcttctcgatatattatgcacctgaatcggacttccgtttgaaagatttga

SEQ ID NO: 17857 - DNA, 380 bp, Glycine max
  unsure at all n locations
cttacttactattcgctcagaactaaactatttgcgtctactttttggagctgccgcaattgctgttcaaactccacccttactttctatcttatccttcacatggatcaacaatttgactatctgcatttgcttttgaaacttcctcccttagttcagcaaactgtctgtcaagcccgggctttaactgcctaaagattctagaccgacctcccttgccagtgctttagcatctatccagatctagttggaggtcaggaaaagatccttagcttccaaaacctgtgcttcatttctcacctaacttctattcacataggaatcttacatagatagatcccttcttcatgtggtttctcttngatcatagaaaccttctg

SEQ ID NO: 17858 - DNA, 432 bp, Glycine max
  unsure at all n locations
tcttcacatagtctgcctttgcttgacctttntatgcttaaaaacagaaacattaggcataggcaaaagatcaagaggagttagtgggttaaaaccataaacaggagaacaattagtggtgctatgaacagctctattgtaagcaaattcaacatggggtaaataagcttcccaagtttttaagttcttcctcaaaactgtcctaagcaaagttcccaaagtcctattagcaacttttgtttgcccatcggtttgtgggtgacaagtggttgaaaataacaatttactgcccaacttgctccacaaagtcctccaaaaatggcttaggaacttagagtccctatcactaacaatgctccttggcaaaccatggagtctcacaatctccttgaaaaacaaatcagccacatgggaagcatcatcaactttttt

SEQ ID NO: 17859 - DNA, 434 bp, Glycine max
  unsure at all n locations
tataatatattgatacgctcgaaattaaacctcggatgctctctatgaaattcaaatggtcataactattcacacggatgttcgattatggcgaatcacatatcgagacgctaaaaattgaacagcggaagctctcgagaaattcaaatggtcataacttttaacactgagttccgattcaggattataatatatacagacgctcgaaattaaacattggaaggtctcgagaaattcaattggttatcacttttcacacggatgtccgattcgggcgtataatatgtcgacacgctcgaaattgaacaacggaagctctcgagatattcaaatggtcataactnttcacacggatctccaattcaggcgcatcgcatatcgagactctcaaaattgaatagcggaagctgttgagaaatttaaatggtcataac

SEQ ID NO: 17860 - DNA, 408 bp, Glycine max
cagctgtttaccccatgttagaattgcttacattatagctgttcatagcaccactaattgcgctccttttgaagatgattatggctttaacccactaactcctcttgatcttttgcctatgcctaatgtttctgtttttaagcataaagaaagtcaagcaaacgcggactatgtgaagaagcttcatgagagagtcaaagatcaaattgagaggaaaaataaaagctatgctaaacaagccaacaaagggagaaagaaggttgtcttcgaacccggagattgagtttgggtgcacatgagaaaagaaaggtttccggaacaaaggaaatcaaagcttcaaccaacgggagatggaccatttcaagtgcttatagaataatgacaatgttacaaagtgagctgccggtg

SEQ ID NO: 17861 - DNA, 343 bp, Glycine max
  unsure at all n locations
gaaaaaagcttttaatggaagttaggaaaatgaaggcccccccgaaccatcaactgggaacccaagtcatgataggggtaaagacatttgtaccgtgtttaggaagtcccacacaaagacatcatctcccaacaacatctggaagaaacggtcaatattctttgatcttccatattggtctgatctacatgtgcgtcactgtctagatgttatgcatgtggagaaaaatgtttgtgataagtcaattggtactcttcttaacattanagggaggacacatgatggtttgaaatattgtcaagacttatttgacatgggaatacgagagaagtcgcatcccata

SEQ ID NO: 17862 - DNA, 318 bp, Glycine max
tttcatgcaagtctttggacaaaattcaatactgaagaacgcgatggggtgtctgttctgagagagaactgccccaacgctagtgcaagacacgtcggtctccaccacaaagggaatgtcgaagttgggaagcgccaagacgggagccgtgaagactgcttcctttaaggtggtgaatgctctcgtagccaactccgaccaccagaattgacccttgcacagcaactgtgagagaggcgcaacaatcttagcgtaacctttaataaatcttctgtaaaaacccaccaaacgcagaaaacttcttaatgtcttcactga

SEQ ID NO: 17863 - DNA, 400 bp, Glycine max
agcttaataaaaggtatgcgatgtgggtggaattcctagagcaattcccttatgttatcaaacataaaaagggaaaaggtaatattgtagccgatgctctttctcggcgtcatgccttactttctatgcttgaaacaaaattgattggtcttgaatgtttgaaaagcatgtatgaaaatgatgaaacttttgaagaaatttttaaaaattgtgaaaatttttcagaaaatggtttctttagacatgaaggctttcttttcaaagaaaacaaattgtgtgtgcctaaatgttctactagaaatttgcttgtttgtgaagcacatgaaggaggtttaatgggacattttggggtccaaaagactctagaaacattacaagaaacattttattggtctcatat

SEQ ID NO: 17864 - DNA, 370 bp, Glycine max
  unsure at all n locations
agttttctcattttttgcggattgacgctcttaagacggctgcgtatatattaaaccgagtgccaatcaaggttgtctcacagacaccttttgagttattcaaaggttggaaatcaatgttgcgacatatacgcgtctggggatgcctgtctgaagtaagaatttataatccacaagagaagaaactagaccctatgactattactacgtatttcattgaatatgctgaaaggtctaaagggtataagttctattgtccatcccactacactacgattgtggaatcaaggaatgcatagtttcttgaaaataacttgatcagtgggagtgatcaatttcngaacatttcttctgaaagggatcactatga

SEQ ID NO: 17865 - DNA, 435 bp, Glycine max
tctatagaaggttagttcctaatttctctacacttgtctcacctctcaatgagctggtgaagaagaatgtgacattcacttggggtgaaagaaaagagaaagcattttctttgctcaaagaaaagctcaccaaggcacctattctagctcttcctgatttttctaaaactttcgagctagaatgtgatgcctctggagtgggtgtgagagctgtattgttgcaaggtgggcaccctattgcttattttagtgaaaaacttcatggtgccaccctcaaataccccacctattataaagagctttatgccttaataagagccctccaaacttgggaacattactgtgaataatgcaggttttgatgatgctaaaaagaaatcacttgataatgattgtcatcatcaaaaacgcggagaatgtgaatgtatgaataca

SEQ ID NO: 17866 - DNA, 425 bp, Glycine max
  unsure at all n locations
ntgtatggtagaaggtgtacgacacctctatgttgtctagagcctcgagaaaacctcaccttaggacctgaagtggtacaacaaaccaccaagaaggtgaagttgatccaagaaaggatgaggactgctcagagtagacaaaaaagttatcaggataagaggaggaaagatctggaattcgaggttggtgatcatgtattcttgagagtcactctgtggactgaggttggtcgagcattcaaatcccgaaaactcacacctttctttatcggtcctttccaaattcttaaaagagtcggtcctgtggcataccaaattgcattacccccatcactttctaatcttcacaatgtctntcatgtatctcaactccgtaagtatatacatgatccatctcctgacatatgaaacatttcctttgagga

SEQ ID NO: 17867 - DNA, 422 bp, Glycine max
  unsure at all n locations
tgccaacccatggaagctcctaatatctctcacactttttggggtgggccattcttggatggccttgattttctcaaggtccacttggaccccatttctaccaactacaaaccctaagaaaactatattatctacacaaaaagtacacttctctatatttgcatagagggtgtttttcctaaggactgaaagaacttgtccgagatgtcctaagttatcatctaggctcctactgtacactaaaatatcatcaaaataaacaactacaaatctacctatgaaatcccttaagacatgatgcataagcctcataaaggtgcttggtgcattagtgagcccaaaaggcatcactagccattcatacaaaccaaacttggtcttgaaagcggttttccactcatcacccntttcatcctgattgg

SEQ ID NO: 17868 - DNA, 409 bp, Glycine max
  unsure at all n locations
atgcatcagggaacaatttcactttataaagtttgtcctaannggattcctaattttcaacttacccttttggatgtgacatcatggcagataggtcccaactttccatcgtggattcagtcacaaaacaaacttctatatgttggactgtctaacacagggattttagattctattcccacttggttctgggaagcacattctcagcttttgtatttaaacctctctcataatcatatccatggtgagcttgtgactacaataaaaaatccaatatctatccaaactggtgatctaagcacaaatcacttatgtggtaaattaccctatctttcaaatgatgtgtatgacttagacctttcaaccaattcattctctgaatccatgccagattttttatgtaacaatc

SEQ ID NO: 17869 - DNA, 385 bp, Glycine max
  unsure at all n locations
agtttgtattgactttccactacactaattgcactaatcatcctctggctgcttatatcttgaatcaaacatgaattagaaaagaaggttaacttgcaatttaatgtagaaaccaattttgatatagagattaaattgaaattgaaagatggcaagtatagcacatcttctaaatgtaaaaactccgtaaatttgactgttctagagtgtgtggctatgacttgttgaccagtangtaggcgaactactatcggatttatttctctatatgtagtataacaagtcaatgaggaggcaatatgatctataaaactagaatccaaaatctatgttgcagcttcaggcttttgaacattacaaacaagggatagtatattacctatgc

SEQ ID NO: 17870 - DNA, 418 bp, Glycine max
  unsure at all n locations
tatccccaaagcgactctggcttagaaaaatgactttccatatttctcaccatatccttaaaagttcggtttcgtcgttctgccataccattcatgctaggttttcctacatagtgtattgcggaacaattccacactctttgagaaaaaatgcaaaaggtcctggacgttctcttgatccatcatatttgccattgtactcgccaccacgatcagatttgagagccttaattttctttccaagttgaagttcaactttatgcttgaaactcttaaaaagtctagggattgggacttcgcatgcatcacatacaagtaaccgtatctagagtagtcatctatgaacaagataaaatattgttgcctattccaagaaggtgtnggaaaaagatatcacatgcccgtatgtactaattct

SEQ ID NO: 17871 - DNA, 417 bp, Glycine max
  unsure at all n locations
gaacgcatgctgccccaanttatgaaacttgtcatacctctntcccggatcaggctcgtgcatctcaatcatttgccatgcagcgtacatagtgcaaatccatgaaaggagcaatattgtaacgccccaacccctgccacaacaaagaaacatgcatgcatgaaggccataacaatagaataatgatacagtataaacactccataataataattttattttctattcattgactatttaataagagtgtttttaggtatatacaagaaacaaactctggatacatatttattatgaagtgatgatgcatgaaaagagaagatgagaataccatcctagctctgacatggcgtatgggatacccagcacaccagctgcaacaacagcagtgacattgtgaaaagcatagtaccacca

SEQ ID NO: 17872 - DNA, 379 bp, Glycine max
agctttgaccatttgaatttctcgagagcttccgttgttcaatttcgagcgtctcgatatattatgtgcctgaatcggacatcctagtgaaaagttatgatcatttgaattgctcaagagcttccattgttcaatttcgaacgtctcgatatattatgcgcctgaatcggacatccgagtgaaaagctattaccatttgaattgctcaaaagattccattgttcaatttcgaacatctcgatatcttatgcgcctgaatcggacatccgagtgaaaagctttgaccatttgaattgctcaagagcttccattgtccaattgtgaacgtctcgatatattatgcgcctgaatcggacttccaagtgaaaagttatgacca

SEQ ID NO: 17873 - DNA, 381 bp, Glycine max
agcttctaaacggatctcatctagctcatttagttgcaactttctttcctctccagcctgatcaatagagaagttgcaggtctttacagcccagtaggctttgtgctctatctctacaggaagatgacatgccttgccaaagacaacccgataaggagacattcctatgggtgctttgtaggcagtcctatgcgcccaaagagcatcatctagcctggtgctccaatcctttctgttcggctgcacaatcttctcctagatcctttttatctccctgcttgaaatctcagtctgcccattggtttgggggtggtatggtgtgtgtcgcaacctaccctttggcgggcgagcgaggtgagggctcacgggtgcgtcttccat

SEQ ID NO: 17874 - DNA, 370 bp, Glycine max
atcttatgacatttggatgatcaagcctccgcagcacaatgatttcccttgacataaaacggacactttctggatccatattatcaaatcgaaccttcttgagtgcaacaattgtatttgtttcgagatcacgagctctataaacactgctgtaagatccttggccaatctgcatcatgataggaaagttaagtcattaagaaaaagctattgggaaggtttgaaaaatgtaatgttggtgatggagataataataataaataagaaagcaatggtggaggctgtaatgaggatttgccttatccaacttctcaaaggaatcagccctgcgaggtatccaaccaataatggcttcaccagcaactgctgt

SEQ ID NO: 17875 - DNA, 381 bp, Glycine max
atctgcttctcttttttttgtatttttttttttacttttgcatgtcttatttcaagggacattgtctctctttgctgaatttcttatttttgtgaagttgatggacatgtgaaatgtgaaaagtggattcgtgatgacaataatcgttctgaagagtggaaggcgacatggtggttaaacagattgatagggcgaaaaaagaaggtgacggtagactggccatatccttttgctgagggcaagttatttgttctcaccataagtgctggcttggaaggttaccatgttagtgtggatgggaggcatgtgacatcctttccctatcgcacggtgcatacccaaatcatatctccttctgtatgcatgcaggaatattgtatt

SEQ ID NO: 17876 - DNA, 380 bp, Glycine max
agctttgaatgcactattcaatggagttgacaagaacatcttcagactgatcaacacttgcacagtggccaaagatgcatgggagatcctgaaaatcactcatgaaggaacctccaaagtgaagatgtccagattgcaactcttggctacaaaattcgaaaatctgaagatgaatgaggaagagtgtattcatgacttccacatgaacattcttgaaattgccaatgcttgcactgccttgggagagaggataacagatgaaaagctggtgagaaagatcctcagatccttgcctaagagatttgacatgaaagtcactgcaatagaggaggcccaagacatttgcaacatgagagtagatgaactcattggttctcttc

SEQ ID NO: 17877 - DNA, 382 bp, Glycine max
  unsure at all n locations
agcttgaangcaagactatacgaggtatcttccttgggtatagcaatatctctaagggctaccgggtctacaacttccaaactaagaaactcgtcatcagtcgagatgttgaagttgatgaatatgcttcatggaattgggatgaagaaaaagtggagaagaacgttcttatacccgctcaactacctcaagaagaagatgaggaagaagacccaggtgaaccactttcacctccatcacaacaacaagatcaagaactatcatcaccagagtttactccaagacgaataagatctttggtggacatatatgaaacctgtaacttggccatacttgaacctggaagctntgaagaagcatcanagcaggaagtatgggtcaa

SEQ ID NO: 17878 - DNA, 369 bp, Glycine max
agcttgtagaccttctcttcttcaccctttcgaacataacccggtggttgttccacatacacgtcctctgtcaattctccgtgaagaaatgcgcttttgacatctagttgatacacattccatcccttttgtgctgctagagctaaaaccatccggattgtgtcccaccttgctaccggggcaaacacttcgttgtagtcaatcccttgttgctgagcatagcctttagctactagtcgggctttgagcttatcaacttcaccattctcatttaacttggttctaaaaacccatttcactccaatcttcttagcacctttgggcaaagttgtaagctgccaggtttaattccttttgattgcttcaatc

SEQ ID NO: 17879 - DNA, 382 bp, Glycine max
  unsure at all n locations
agcttgtgcctcttttcgtctggaatatgaatgtagcatatagatccaaagacccttaggtgctttgctgatggcttcttcccgttccaagcttcaattggagtcttgtcttttacagacttagttggacatctgctgagtatgtaaacagcagtgtagactgcttcagcccagaatgtgttaggtagtcccttttccttgagcatcgatctagccatctccataactgtgtgattctttctctcggacactccattttgttgaggagaatatgcgactgtaagttgtctctcaatgccttcatcctcacaaaatctttcaaactcgcgagaggtgtactctntgccacgatcgcttcttagtacttttatccgttttccac

SEQ ID NO: 17880 - DNA, 384 bp, Glycine max
agcttatcaacatctttcttggagaaagagttcttggggtcaagacatgagaagcaatcaagtataatgttacttccttcactaaagcggtgatccatctccacacatattttatcaatagcaacataaaaaatctctacacggtaatgatgaagattagtgatagtcctcccttctgctcttgaacgaccccgaactggtatttcgtcatccatatttggtaccagaatacttttagcaacacaaaatccttggacatcggcaaaaaaattattccagccactctctctcattgtgcccaaccgagctttgacaacatcaactaattccatggcattcacaatattaagatcttttctttgcaatatatttgaaagctcgttt

SEQ ID NO: 17881 - DNA, 377 bp, Glycine max
agtcttttcttgtttctctccccatttgaaaccagcatttttcttgagcacttcattgagaggtgctgccaatgtgctaaaatccttcacaaatcgtctataaaaacttgctaagccatgaaaactcctcacctcggtcacggacttaggtgtaggccattcttgaatagccctaaccttctcctcatcaacttgcactccttttgaactcacaacaaaaccaagaaacacaacatggttagtacaaaagatgcatttttcaagattggcatacaattgttcttctctaagcacagtcaaggcagattttaaatgatcaatatgcaaatcaagtgaagtgctatagataagaatatcatcaaagtacaccacaacga

SEQ ID NO: 17882 - DNA, 379 bp, Glycine max
  unsure at all n locations
ttgcatgcaagtcttacccaccttgctagtataaccagccttctcaatggcatccatgagtaaaacaagaccctcctgttatcttgaacattgngagcaaatcctccgtcatctccaacattacatgcatcttgtccatattttgccttgtaccccttaatacatgataaactgttctaccagaaataaccaagttaactgattgtcaccatatatagatcgctggtgagattgaaaaaatcatggaatttatgctatagataatatgcagtcaggaaaaatggaattaagattagctatcaaatcatatgtaatacctacctaagaacctaatattagcacagaaagtaatatctgaactcaccaattcacactcacc

SEQ ID NO: 17883 - DNA, 351 bp, Glycine max
atctttccctgctctctttggctgtttctataaatagtgatgtaagctccattggagcttggcggcctaggatcttcttcatcaatggattcctttgcttcttggaagaagaatggtcgtggaatggataaggaagagagagacgagatgccacttcaaggagaagatgagtgtacatgaagctcaccaccgtatgatgccctggattagagcttggatgaggaacgagatgaatgattggagaggatgataagagcacaaacctgcgtgctctaatagtactctgacaactgatggttaattgtcaaatgatcaacgttgatgaaatgcacacacatggcctctatatat

SEQ ID NO: 17884 - DNA, 372 bp, Glycine max
tgtttggcataaattcatgatccgagaatataatatagagaattgatagaatttggttgtattatatttgctcttatgcttcttatttaaaaaaatatgcgtcctttgactcttacacaccaagagtaatttattgttgatttccatattttatggttacatagatattcatattcttatcaaccaaattttagctaaataaaagtattgttttatatcttaattataaaatatataaaaacaaaatatgaccaaactttaatctaaaatagtaaattaattaaaaatataatgtatatttagtacttgtaacaaatataatatattatataaatgtataaaaataactcacttataaacgtataagtttgg

SEQ ID NO: 17885 - DNA, 384 bp, Glycine max
  unsure at all n locations
agcttcaaccaaggtgagatggaccatttcaagtgcttgaaagaatcaatgacaatgcttacaaagttgaactgcccggggagtataatgttagttccaccttcaatgtctctgatttatctctttttgatgcagatggagaatccgatttgaggacaaatccttctcaagagggagagaatgatgaagacatgaccaagagcaagggcaaggatccacttgaaggacttggaggacctatgacaagggctagagcaaggaaagccaaggaagctcttcaacaagtgctgtccatactatttgaatacaagcccaagtttcaaggagaaaagtccaaggttgtgagttgtatcatggcccanatggaggactaaatgacaccac

SEQ ID NO: 17886 - DNA, 370 bp, Glycine max
agcttcaacatcagtatcacttccagggtgctggaactacttcacatggacttgatggggcctatgcaagttgaaagccttggaggaaagaggtatgcctatgttgttgtggatgatttctccagattcacctgggtcaactttatcagagaaaaatcagacacctttgaagtattcaaggagttgagtctaagacttcaaagagaaaaagactgtgtgatcaagagaatcaggagtgaccatggcagagagtttgaaaacagcaagtttactgaatactgcacatctgaaggcatcactcatgagttctctgcagccattacaccacagcaaaatggcatagttgaaaggaaaaacaggactttgcaag

SEQ ID NO: 17887 - DNA, 375 bp, Glycine max
agcttcaaaggcttagacaagggactatgagtgttgaagaatatagacaaaaaatggaattactccttttaagagctggacttatggaggaggaaagaacaagcatagctaggttccttagtgggcttaatatggaagtgagggacaaggttgaactccttccatatagggacctagatgagctagtccaactttgtataagagtggagcaacaacttaaaagaaagccttcttcaaaatcttatggctctcactcttatccaaggaaggaccaagcctatggaattttaggggctgcaccttcaaaacccaaggaagataagggtaagaccatagagaaatacacccctaagactagttcccaagaaaggacta

SEQ ID NO: 17888 - DNA, 384 bp, Glycine max
  unsure at all n locations
agctttcttnccagcttcaaactttaatcttcatggaactcatgttggttcccctatctcttaccaaaattgcacttactcctaaaaaggaacattgttttataacaaattaaggaattttcactaaatgattttattaacaaataaatgtttaaagatgagacatagaatccattctcgattgtaagttctttttaatctaacaaataagttcataattttcaacttatcagagaattgtctaatacttaatatatataataatagtaatttcgataaagatattcatagataattatagtagtatcgtataacagtttgtaatatactttgtaagtagattntatgatagtgttttcgattaanaagtaaatttcaacaatt

SEQ ID NO: 17889 - DNA, 365 bp, Glycine max
agctttgatgcaacatttggagaggttaatgaaacaacgagatgatgcgctccatgagaggttggaatagagatcataatgaagaagaaaggaggagaatagggaatgatggtgttcctagacaaaaccgaattgatggtattaaactcaacattcctccatttaaaggaaagaatgatccggaggcctacttggagtgggagatgaaaatagaccatgttttctcatgcaacaactatgaggaggaccagaaggtgaagcttgccgccacggagttttccgactatgctcttgtgtggtggaacaagctacaaaaggagagagcaagaaatgaagagccaatggttgatacatggacggagatg

SEQ ID NO: 17890 - DNA, 426 bp, Glycine max
  unsure at all n locations
agtctttattcaactcaaacatggcaagaagacagtatatactaggcactgaagatttcttaaaccttatcacccgtaccgactattgaagaaagcttttaatgaaagctaggagaataaaagtgctccttgaccattagctagaaatgaagtttatgatcaggtgaaggacatcataactatctttgggaagacccaaagccatcatctaagactaacctatggaagaaaaggtcaatattttttatcttccatactggttcgatctacatgtatgtcattgtctagacgtaatgcatgtggagaaaantttttgtgatagtttaattggaacccttcttaacattaaaggcaagacaaaggatggtttgaaatgtcatcaagacctggttgacatggaaatacgagagcaattgcatttgatat

SEQ ID NO: 17891 - DNA, 323 bp, Glycine max
tacattacatatattacagcatttcagtgcactgtgaagtgtaaaacacaatttagattggatagaacagataaagggagaatgttcaattaccatagcatggcaatagctgaccccagatatgagtcgctgaaagaagaatccagcctgaatcataacaacgggttacaaactatcgcagaataagtacaaacttatagcattcaggtgtagaataagtaaacaaaataaataagaacctcatcctcggtaaaacgcccagcattgcagattattttaaagagctcttccccagatgcatattccattacaatagcaagatg

SEQ ID NO: 17892 - DNA, 414 bp, Glycine max
agtttgtttatatttgcaaccttttcgatgccagaaaacgttatcaatggaccggaaacaacatcgcgtgttactaaatacctcatgtaaggttctgcatgagcctccaaataaggaagtccttcgatcttaagtatttgatcatagacacccttgttgaagctgtcagccacggattttgagaccaataagactaacatcacaagtggaagtaacaagagatcattagagagctcaagcaatatgacacaaagagacactgtcattctcatggtgccaccaaggaaggaagcagctccaagtaaggcaaagagtcctctgtcgagatcggtaatcgtttcgaagagccggtcgaatagactgccataggcagcaccagcacgtatgaccggaatgaacagcccggatggaata

SEQ ID NO: 17893 - DNA, 445 bp, Glycine max
actattcacacaatttaacaagaaacaatgaattatcaactttgaaaattaattgcattcccatacctagatctccttctaaattccaccgaatttatatatgtttaaatgcatggaagcaaggattcaagactagctgtggatcttttattggtcttgatggttgttttttgaaaggctactatggtgatcatttgcttgcagcagcgggacaagatgcaaacaatgcattttttgtgattgcttatgcggtagtaaatgttgaagataaagataactggaagtggttcctcacattgttacatgaagaccttggagactgcaagcaatatggctgaaattttatgttagacatccaaaaagtgcaattcaattgttttgctttgatcaattcatatatagaatgttgtaattctgattgcctgcatgcatatgtgatagtttg

SEQ ID NO: 17894 - DNA, 407 bp, Glycine max
agtttcttgagagagtcaaagatcaaattgagaggaaaaataaaagctatgctaaacaagccaacaaagggagaaagaaggttgtcttcgaacccggagattgggtttgggtgcacatgagaaaagaaaggtttccggaacaaaggaaatcaaagcttcaaccaaggggagatggaccatttcaagtgcttgaaagaatcaatgacaatgcttacaaagttgagctgcccggtgagtataatgttagttccaccttcaatgtctctgatttatctctttttgatgcagatggagaatccgatttgaggacaaatccttctcaagagggagagaatgatgagggcatgaccaagagcaagggcaaggatccacttgaaggacttggaggacctattgatgaggacatg

SEQ ID NO: 17895 - DNA, 454 bp, Glycine max
  unsure at all n locations
tgaatcggacatccgtgtgaaaagttatgacgatttttatttctcttgagcttccggtgancaattgcgagcttctcgatatgtgatttgcctgaatcggacatccgtgtgaaaagttataccagttgaatttctcaagagcttccgttgttcagttttgagcgtctcgatatgtgatttgcctgaatcggacatccgtgtgaaaagttatgaccatttgaatttctcaagaccttccgatgatcaatttcgagcctctcgacatattatgcgaccgaatcggacatccgtgtgaaaagttatggccatttgaatttctcgagagtttacgatggttaagttcgagcgtatcgatatagtatacagctgaatcggacatccgtgtataagatttgaccattaggattcctcgagaacttccattgttcaatatcgagcttctcgacatattaag

SEQ ID NO: 17896 - DNA, 442 bp, Glycine max
tctctgtcttcatggaccaaaggtgtcattccctgcttgtttatatgaatccgttgcgacgaatgcatctctgtgaccgctataactgttacaaatcttgggctacaacgtactctccacgctctaaaactctcatcctatcccaaactgctcactatggatattagccacaacagtactagtggaactattcctcagcaaattgctaacttgtacagagacactcaattgataatgagtgctaataattctagaggtccaatccaccattacatgaggaagttggctagctcgtcaattctaaacttcgaatacactacactctctggctctattcctgaagagattgcatactaccagaacttgaagagtctattacttcaatggaatcaactttcaggtaccatacctccaacaactggaaggttgtccaaccctgtta

SEQ ID NO: 17897 - DNA, 371 bp, Glycine max
actactatagaaagacacttcaatctgtattaggcttctactggtgaaaaccgagttgaagcccgatgtagaatgtatgttgttacatcgatttaaaaaaccgatgttaacataaaaatgttaacatcggctttataaataactgatgttataaagaaagaagtacaacaaaatatgtgtatgcgtgagggacgttgacatcggttttctgctaaaaccaatgctaatatgttaatatgttatattaacatcactttttataggaaaccgatgtgaacgttcatcattcatgcacctattttgctgtaataatgtatgtataacatcgattatctataaataaccgatgttaacctatgtacattaacatc

SEQ ID NO: 17898 - DNA, 407 bp, Glycine max
ttgtttatccaatcagatgggacaattggctacccaattgaatcaacaacaatcccagaattctgacaagctaccttctcaagctgtccaaaatcccaaaaatgtcagtgccatttcattgaggtcgggaaagcaatgtaaaggacctcaacccgtagcaccttcctcatctgcaaatgaacctgccaaacttcactctattccagaaaaaggtgatgacaaaaatttacctaacaatttctgtgcaggtgaatcttcttccacaggtaattctgatttgcagaagcagcacattcccccgcttccattccctccaagagcagtttccaacagaaaaatggaagaggcagagaaagagatcttggaaacgtttagaaaagtagaggtaaacatacctctgttggatg

SEQ ID NO: 17899 - DNA, 460 bp, Glycine max
  unsure at all n locations
tgannattgagtgaggaaaanatgtctctcactaagcttattcattacttggtaagattacaaaatatatagagaaaagatggaagagagagacagcctactctcaggcctatctctgctaacttctcagataagcaaaatattacatcagtcatacatcaagtaaagcaagatattcaacactccccctcaagctggagcatataaatcatatgcaccaagcttggaacatatagattgaatcctaggtcctctcaaggacttagtcaaaatatctgttggctgatcattggaactaatgaactcagtgacaatctccttggacaatagtttctcccgaatgaaatgacaatcaatctctatgtgcttagttctctcatgaaaaacaggattcgaagcaatgtggagagcagcctgattatcacaatataacctcatntgcccaacttcacanaatctc

SEQ ID NO: 17900 - DNA, 474 bp, Glycine max
ctcagaacactcaagcttggaacctatgttggtgatatgctaagatggacgtgttgacttgtttactcctctaataaagagtacaacaaattttgtgtttgatgatttaggttttctctttttctttcttgttcatatgcaacgttcatttttttctcttatttgcttctattctatctcctatctctatatatttggcatgggtgtcttcgactatctcacgttccaattgagatgagagataagaatttatctaatatttgtgtcttttttatacctgtatataataatcacatttttatactataattaaataataagataaattgtataaactttagcacaatagaaatgcagacgcgagaactattactaaaaatacatatagaatttattaattttgggtaatagttaacaaaaatcaaaagagtgtagtggagatggtgacattttaaaaagttaatagcaaaagag

SEQ ID NO: 17901 - DNA, 411 bp, Glycine max
tttcttgctttgaaaacttcccttcaccctaggccttagaaactacaatggttgagtgagaatggggagctagttgtagatatacaagttttgctatgctttttcattggaaaatatgttgatgagatactgtttgatgtagtccctatggagcctagcaatctcttacgtggaaggccttggcagtatgataaggatgttgttcataatggtgtcacaaacaaatttgcatttgtacataaaaggaaaaaggttaccctcacacctatgtctccaagtgaggtttgaaaggatcaaataatatatgagagtgataagagaacaagagactaaagtgaaactttgtaacataagacaccaaactgaaacatagataaagtatcttattacacaatttgactattattacta

SEQ ID NO: 17902 - DNA, 442 bp, Glycine max
  unsure at all n locations
tatagttattggagggagaataaaacaatccaaaatttattgtacctttcaagtaacgaagaattctttttgcggcttttagattaggagaggtaggagcctccataaagcgacacacaactcccaccgcatatagaatatcgggccttgtattggttagataccttanactccccacaagactcttgaagatcgaggagtctaccttctctccttcatcaaactttgataacttcaagccaccttccataggtgtgttcacaggattgcaatcaagcatattaaatttcttcaacacttcttttgtgtacctttcttgtgagacaaagatacaccattctttgtttgcttcacttccattcccaagtaatatgacatgagtcccatatctgtcatatcaaattcacgagacatggactccttgaagtcttcaaacaaattt

SEQ ID NO: 17903 - DNA, 467 bp, Glycine max
  unsure at all n locations
tataaaactaagcttacaagcaagcttccatcacaatgattggccaacattaataatgtgaagaggatgcttgaatatatgggttaaatccttctgtgcataaaccgagtcgcacattccgcagatcaacaacaaaatctgcatgtacccgatcaaagtgctttcaggcttcaccatcagatggatggcgtaacatgcctgaagatcttctattctcatagtgccatgacatttgtcttgcagtttgtattgatgcaaatagtctttacaaccttggaattataggcaaataaaacatctcctttattagaactggttttttgttgcttgttccaacagtcttcgcacaatacctgngcttgttacanaaattgcattcaattaaagctccatcattgttataatacaacatgaagccttccacaaaacagtcaatcctcttagcctccaatcccaacttcgatact

SEQ ID NO: 17904 - DNA, 446 bp, Glycine max
  unsure at all n locations
ctcaagctgcctcccttttagggcattttctgccacaatctagttgcttacaatcgttacctttgcattagtaaaaccaatcgcatgctaatatgtaaaatgtaaaatataataaaagtaaagaattaaatatgtactaatggttagtcaatttctcatctcatttgtgttgacttgtggcatttaacgaatattctcttctcttattgacggacatacactcactacatgaattctaattctacttgcttatgaaggtaactctgactataataatggtttaagtaaataatatataacggaaaaattataaatgtcgtctttattaaagggtgacagtgaccaacgtacttaattatcaaaatgaaatataaataagataataatgttagatcactanggctaaacctttgtcaagatgtgaatcaatacttgccattgatcct

SEQ ID NO: 17905 - DNA, 411 bp, Glycine max
  unsure at all n locations
agctttgagccaattcaaacgacatattctttttactcggatgtctgattgagtcctgtaatataacgagacgctcgaaattgaatattgaacctctgaggaaattcaaacgacaataacttttttctcggatgtttgattgagactcgtattatatcgagacgctcgaaattgaatgttgaagctctgagccaattcaaacgacaataactttttactcggatgtctgattgactctcgtcacatatcgagacactcgaaattgaatgttgaagctctgagccaattcaaacgacaataactttntactcggacgtctgattcagtcctgtcatatatcgagacgctcgaaattgaatgttgatgctctgagcaaattcaaacgacaataactttntactcggatgtctg

SEQ ID NO: 17906 - DNA, 477 bp, Glycine max
  unsure at all n locations
ggaccttaaaactaagcttaancattcaatttgagcgtctcgtaattttacgggactcaatcagacatccgagtaaaaatttattgtcgtttggattggctcagagattcaacattcaatttcgagcgtctcgatatattacgggcctcaatcagacatccgagtaaaaagttattgtcgcttgaattggctcagagcttcaacattcaatttcgagcgtctcgatatatgaccggactcaatcagacatccgagtaaaaagttattgtcgtttgaattggctcagagcttcaacattcaattttgagcgtctcgatatattacgggactcaatcagacatccgagtaaaaagttattgtcgtttggattggctcagagattcaacattcaatttcgagcgtctcgatatattacgggactcactcagacatccgagtaaaaagttattgtcgtttgaattagctcagagcttcaac

SEQ ID NO: 17907 - DNA, 462 bp, Glycine max
  unsure at all n locations
tgactattactttatacattcaaccaatgagagaaatatgtctatattcatttaaagactgtggatgggttgttttaggaataagagccaagaacgaggcattgctgcctatagggaagctaccatgaatatggaattcatccacaaatctcctgaattcaggtttcaaaaccccccaaaattccttaataaaattgaaattaaagccatttggccccggacatttgtctccaccacaactccaaacaacatctttaagctcttggtctgaaaaaggggcagtcatcccctctttgcctctgatcaatcatagggaaatataccccatccagagaaggtctgaacaatttatcttcagtaaatctatggagaaagtatntgagaacttcattcttgactaaattaggctgctgaacccatacaccatcaatgaagattccctgacaagcattgaagtttctt

SEQ ID NO: 17908 - DNA, 458 bp, Glycine max
  unsure at all n locations
tgtagcanatntaattacagaagcaggtgcaaatcgtgtacttgcttgtgacctccattctgggcagtccatgggctattttgatattccagttgatcatgtgtatggccaggtaacggattattatgtcactagcatatagtaatagcatggaagaataaaaagcatttaatctattaaactcaaacaaacatggcttggatgtgttgtatattagtaatttgtaattgatagtccatccaataatttgttaatttattgtatttatgcatctcaagtctgaattgaaatgaagggacaaccttctggaaacatgcttattttactgtttatagttatatgatcatttaaatttacgatttctgtagtaaagaaacttcaaatctagttttctttagacgtgctaaaatcttctattgttctatttatcccagatcagtcacacatggactctaatg

SEQ ID NO: 17909 - DNA, 390 bp, Glycine max
  unsure at all n locations
agtttgtaattcttgatccgcagataacataggtggtaaagtttgggactggaacgagtcaccaatggctttcttgaggaaagagaaataaaatgtcagatgaattttactgtgagatggaagatccaacttataagcaacaacaccaaccttgtttaacacctggaaaggaccataaaaccaaggggagagtttttcattaatccttttagccaaggatcttctcctataaggttgcatcttcaagaacacccaatcaccgactgcatattctatgtctcggtggcatttgttggcatttgctcacatgatatcttgagacttcaacaaattttctcttagagtagccaataattcattccaagaaattnttagtttattgacttcttc

SEQ ID NO: 17910 - DNA, 450 bp, Glycine max
  unsure at all n locations
tcttagccaacttgcttcctcactagcagttgctagtgctatcatctcagattccatagtggactgagctaagatcatttgtttctttgacttccaagaaacagccccaccagctatgctaaatatatagccgctggttgctttggaatcatctgagagagtgttccaatctgcatcgttgtatccttcaagtacagcgggaaaccttttataatgtaatccaagatttatggttcttttaaggtacctcattaccctttcaatagcgtgccagtgctccatactaggtctactggtaaacctgcataataatcccacaacataggctatgtcgggtctagtacaatcagtggcatacctaaggctgccaatgatacttgcgtactcagtttgtcgtataccttcaccagtgttcttaaacagttntacactnggatcatatggtgtact

SEQ ID NO: 17911 - DNA, 455 bp, Glycine max
  unsure at all n locations
gaacttaaatctaagcttcatgtaaagatgggcgaagagggatttattactttcgaacttatacacacagatctaatggggtcgacaaaaacacctagatatagtggatgtatagatactatggcagtatatgatgattacactcgatatacttggttgtatttcctaaaagagaatagtgaagttacgcataagtcagntattttctctgacatggtggagaaagaccgtgatggaacaatcaaatgcttgacgagcgactatggatgagagttcaagtcaacagatttcacagttttttgtcctgagaaaatggatccatatgcaatttacttgtccagatacactgcaacaaaatgcagtggctgagaggaaattatctcatctaactgtagtgagcttgtcatggatacatgacaaaaatctgcctcgagagatatangcagaagcaattc

SEQ ID NO: 17912 - DNA, 413 bp, Glycine max
agtttattctaagttcaacctaccaccctcagactgatggccaaactgaacggaccatttagtcactaaaggaccttttaagagcatgtgtattagaacaaaaagggagttgggagtgttttctgttgttgatagagttcacctataacaatagttttcattctatcattggcatggctccatatgaagctttgtatggtagaaggtgtaggacacccctgtgttggctagaacctggagagaacttcaccttaggacctgaagtggtacaacaaaccactgagaaggtcaagttgatccaagagaggatgaagattgctctgagtaggcaaaagagttatcaagataagaggaggaaagacatggaattcgaggctggtgatcatgtattcttgagagtcacctcttggact

SEQ ID NO: 17913 - DNA, 437 bp, Glycine max
  unsure at all n locations
ntatgcaagtcagctttcaagaggcatctcggagatttcttttttttcatatcngcgcaaaatctcttgaattatgaagatgttgtccatcatctttttgttcttaatgaaagcagtttgagtttccccaataatagtctcaagcactggggctatgcggttggccagaattttagacacaatcttgtataacaaattacagcacgatatgggtctaatatgattaacctgtgaggcctgatcatgcttaggaataagcgcaataatagcatggttgagctgctttagaatttctccagttgtaaagaattcattatccgcttcaaagatatcatgaccagtgatattccaagccttcttgaagattaaaacattgaaaccatctggcccaggagctctattgttattcatcacagacataacgttccaaacctctt

SEQ ID NO: 17914 - DNA, 412 bp, Glycine max
agcttgctctacttgaaaagcctcttttgaatggtgactctaatgtaagcaacaattatgttcccattaaggctagaggaaatgaaaatttaacctggtattcaaatgttggatttttcagcattcttactttctcatggatgattcctttaataactctagggaatgagaagactttagagcatgaggatctcccacatcttgctactgatgacagtgtggatgggattttgccaacttttacaaacaaacttgagtcagagtgtggtaatgtgataacaaccctactctagtttcataacaaccctacgaaaatatgaggttactgcacacatgaacaacactacactagtgtgataacaaccctgcttacactatgcaaacaaccctgcttccagtgtatgtttgtgat

SEQ ID NO: 17915 - DNA, 454 bp, Glycine max
tctcgagaaattcaaatggtcataacttttcactcatatgtttgattcaggcgcataatatatcgagacgctcgaaattgagcaacgaaagctctcgagaaattcaaatggtcataacttttcactcggaggtccgattcacgcgcataatatatcgacacacccgaaattgaacaatagaagctctcgagaaattcaaattgtcataacgtttaacacggaggaccaattcacgcgcataatatatctagacgctcaaaattgaacaacggaagctctcgagaaattcaaatggacataacttttcactcggaggtccgattcaggcccataatatatcgagacactcgaaattgaactacggaagctctcgagaaattcacatggtcataacgtttcattcggagatccgattcaggcgcataatatatcgagacgctcgaaattgagcaac

SEQ ID NO: 17916 - DNA, 391 bp, Glycine max
agcatgctttacttgaaaagcctcttttgaatggtgactctaatgtaagcaacaattatgttcccattaaggctagaggaaatgaaaatataacctggtattcaaatgttggatttttcagcattcttactttctcatggatgattcctttaataactctagggaatgagaagactttagagcatgaggatctcccacatcttgctactgatgacagtgtggatgggattttgccaacttttacaaacaaacttgagtcagagtgtggtaatgtgataacaaccctactctagtttcataacaaccctacgaaaatatgaggttactgcacacatgaacaacactacactagtgtgataacaaccctgcttacactatgcaaacaaccctg

SEQ ID NO: 17917 - DNA, 407 bp, Glycine max
  unsure at all n locations
tttctttttatgcactattcaatggagttgacaagaacatcttcagactgatcaacacttgcacagtggccaaagatgcatgggagatcctgaaaatcactcatgaaggaacctccaaagtgaagatgtccagattgcaactcttggctacaaaattcgaaaatctgaagatgaacgacgaagagtgtattcatgacttacacatgaacattcttgaaattgccaatgcttgcactgccttgggagagaggataacagatgaacagctggtgagaaagatcctcagatccttgcctaagagatgtgacatgaaagtcactgcaatagaggatgcccaagacatttgcaacatgagagtagatgaactcattggttctcttcaaaccttngagctatgactctcggat

SEQ ID NO: 17918 - DNA, 370 bp, Glycine max
  unsure at all n locations
ntccctcgttgaacaaataccgataagtttgatagtttccatcttgggcctttgtgccacaactatcgtgaatgggagagaaatgttcatctaaagcatacaagcccctaatattatcaaatcctaaaattcgagctcctagggagcaaaataatgtgagtcttctagagagggcatcaactaccacatttgttattccctttttgtattcgataacatatggaaattgctctaggtactctacccattttgcatgcctcttgtttaactcgctttgccctctaatgtacttaagtgattgatgatcactatgaatgacatatcccttggaaacaaagtaatgttcccaagcttggaaggctattattaa

SEQ ID NO: 17919 - DNA, 417 bp, Glycine max
agctttcactctgaggcccgattcaggcgcataatatatcgagacgctcgaaattgaacaacggaagctatcgagaaattcaaatggtcaatacttcgaactcggaggtcctattaaggtgcataatatatctagacgctcaaaattttacaatggaagctctttggctatacaaatggtcataacttttcactcgaaggtccgattaaggcgcataatatatcgagacgctcaaaattgaacaatggaagctcttgagcaattcaaatggtcataacttgtcactcggaggtccgattcagctgcataatatatcgtgacgctcgaaattgaacaatggaagctcttgagcaattcaaatggtcataacttgtcactcgaaggtcggattcaggcgcataatatatcgagacactt

SEQ ID NO: 17920 - DNA, 452 bp, Glycine max
  unsure at all n locations
ntgatgtaacatttggagaggttaatgaaacaacgagtatgatgcgctccatgagaggttggatcaaatggagaatagagaccatatgaattgctcaagagcttccattgttcaatttcgagcgtctagatatataatgcgcctcaatcggacctccgagttaaaagttatgaccatttgaaatgctcaagagcttccattgttcaatttcgagcgtcacgatatattatgcacctgaatcggacctgcgagtgacaacttatgaccatttgaattgctcaagagcttccattgttcaattttgagcgtcacgatatattatgcacctgaatcggacctgcgagtgacaacttatgaccatttgaattgctcaagagcttccattgttcaatttcgagcgtctcgatatataatgcgcctcaatcngacctccgagttaaaagttatgacca

SEQ ID NO: 17921 - DNA, 458 bp, Glycine max
  unsure at all n locations
ccattcctagactngatgattngcttgatgagtttcatggtgccnatatcttttcaaaaattgatcttacaagtaggtatcaccaaatcaggatgaaaaagggtgatgagtggaaaaccgctttcaataccaagtttggtttgtatgaatggctagtgatgccttttgggctcactaatgcaccaagcacctttatgaggcttatgcatcatgtcttaagggatttcataggtagatttgtagttgtttattttgatgatattttagtgtacagtagaagcctagatgatcacttatgaaatctcagacaagttctttcagtccttaggaaaaacaccctctatgcaaatatagagaagtgtactttctgtgtagaatatatagttttcttatggtttgtagttggtagaaatggagtccaagtggaccctgagaaaatcaaggccatccaagaatgg

SEQ ID NO: 17922 - DNA, 396 bp, Glycine max
  unsure at all n locations
ntcagaagatgtaagttcaacatgcttttcttccatttctgttggaggatttgtgggatgctgtcttatcattttttggtatgtctaacttactggactggttctcctactgtaggtcgatctagagagaattgcaaaagatactcatggatatgttggtgctgaccttgctgccctttgcactgaagttgctcttcaatgcatcatggagaaaatggatgtcatcgatttggaagatgagagcattgatgctgaagtactaaattctatggcaatgacaaatgagcatttacatactgctctgggaacaagcaatccatctgctttacgagatactgttagtagtgtttttaattcttttaaatttaaattattatctagctggtgaggctttct

SEQ ID NO: 17923 - DNA, 455 bp, Glycine max
ggcataatgaattaatgtacataccgcataaagggcttaggaaagtctcatagcattgtggagtgaccaagctgaggccctgtggtcgacacacacggcaatgatcacgcattgaaagcttgccatgaaacacattaagccagtgctcgtgtaaggagctggaaatgtcttgcttatgtctttctgaaaaacgtaatgatataataattctcttaaagaggaaaattaaactagttaagatagattgatgcttaattacttgaattatgaaccatgctgcccaaacaagggtgctaagaattacgaccaaagggcctaggaacatgtttcctttgccagaagagctagttccttccattttctcagcatatctccagtgaatacttgattggcctaaaccaatggtttttccatggtaaaatgacaaaagcaaggctccactcacacacaatatt

SEQ ID NO: 17924 - DNA, 364 bp, Glycine max
agctttgtagccaattcaaacgacaataactttttactcgaatgtctgattgagccccgtaatatatcgagacgctagaaatggaatgttgaacctatgagcctattcaaacgacaataactttttactcggatgtctgattgagtcccataatatatcgagacgctcgaaattgaatgttgaacctctgagccaattcaaacgacaataactttttactcggatgtccgattgagtgacttaatatgtcgggacgctcgaaattgaatgttgaacctctgagcaaattcacacgacaataactttttactcggatgtctgattgagttccgacatatatcgagacgctcgaaattgaatgttg

SEQ ID NO: 17925 - DNA, 411 bp, Glycine max
cattcaatttcgagcgtttcgttatattacgggtctcaatgttatcatccgagtaaaaagttatagtcgtatgaattggctgaaagcttaaacattcaactttgagcgtctcgatatattacgggactcaatcagacatccgagtaaaaagttattggcgtgtgaagcggcttagagccttagcatacaattatgagcgtctcgatctagtacgggactgaatcagacatccgagtaaaaagttattgccgtttgaattagctcacaggtgcaacattcaatttcgagcgtctcgatatattacgggactcaatcagacatccgagtaaaaagttattgactgttgaattggctcagaggtgcaacattcaatttggagcgtctcaatgtattacgggactcaatcagaca

SEQ ID NO: 17926 - DNA, 411 bp, Glycine max
ttcttatgctgcaaatatttacaatagacctactcaacctcagcagcaaaatcaaccacagcagagcaattatgacctttccagcaacagatacaaccctggatggaggaatcaccctaacctcagatggtccagccctcagcaacaacaacagcagcctgctccttccttccaaaatgctgctggcccaagcagaccatacattcctccaccaatccaacaacagcaacaaccccagaaacagccaacagttgaggcccctccacaaccttccctcgaagaacttgtgaggcaaatgactatgcagaacatgcagtttcagtaagagaccagagcctctattcagagcttaaccaatcagatgggacaattagctactcaattgaatcaacaacagtcccagaattctga

SEQ ID NO: 17927 - DNA, 393 bp, Glycine max
  unsure at all n locations
ttctaatccaatcagatgggacaattggctacccaattgaatcaacaacaatcccagaattctgacaagctaccttctcaagctgtccaaaatcccaaaaatgtcagtgccatttcattgaggtcgggaaagcaatgtaaaggacctcaacccgtagcaccttcctcatctgcaaatgaacctgccaaacttcactctattccagaaaaaggtgatgacaaaaatttacctaacaatttctgtgcaggtgaatcttcttccacaggtgattctgatttgcagaagcagcacattcccccgcttccattccctccaagagcagtttccaacaaaaaaatggaagaggcagagaaagagatcttggaaacgtttagaanagtagaggtaaacata

SEQ ID NO: 17928 - DNA, 451 bp, Glycine max
  unsure at all n locations
tgaggcgagagttaatgaaatctctncttatggaactccttcctaagaatcctagagtcatgagatctcttcactttctcattgtaaatcttggagttctcataggcttctaagcagatcttctcaagttatagcaattgaagcttcttttccatacctgcttcatcaaatgccatgttacaacccttcactgcccaataagcaaggtgtgcagtctctaccagaaggtggcatgccttaccaaaaaccactctattgggagacatccacaaaagtgtttggtaagcagtcttgtgggcccgtagagcctactcaagtaacttgctccaattctttctattgagttgcactaccttcaacaacacttgcttgatctctctattaaaaacctccgcttgcccattagtttggggatgataagctataacaactctattcacaaccccatact

SEQ ID NO: 17929 - DNA, 404 bp, Glycine max
  unsure at all n locations
tgtttgttatcaattacacacatattgtaatcgattaccagaggagtttttcagaaaacattctcaatagtcacatctttttatctgatttttaagtggccatcaaaggcttatatatatgtgactagagacacgaatttgataagagttttgaagaacaaaaaggtcttatcctcttaacaagcaaaattgttttatcctcttacaaattccttggccaaaacacttgtgattcaataaggaattatttaagtgctcaaattgttcaatctatctctttcaagagagatttcttcttctcttcttctttattctgaanagggattaagagactgagggtctcttgttgtgaaaggattctaaacacaaagganagaatgtccttgtgtgtttagaacttgtaa

SEQ ID NO: 17930 - DNA, 436 bp, Glycine max
tgatttagtataataagaagcacggatataaatatcttgatgcctactattgatatatagcattgaccatacatgaaactagctaaagagaatggaaactattgataatagtacactccatagatagtcatgctgtgtaaaccactactacaagaaagcactttaaattatagtattagctagtaatttctatgattgtgttgatcatggtcgccctcacataactgtcaggtgccctcacttttaattgtgaatttcctgctgccacattaaaggttgccaatgttctgccatcacatgtatgattttctcagccaattttgccaccaattccttgacatgggttggcagccagtttcggaccctttgatggacactgaattgacaacagcagctccacccacattggtgatcaaaactaggttgaattatcagt

SEQ ID NO: 17931 - DNA, 407 bp, Glycine max
tcttcttttgtgtgggatacccaatgtgagcatagtttccagacccttaaggaaagattgacgaccgctccagtgctagttttgcctaacccgagagaaccttttgaggtgtattgtgatgcatcaaagatgggtttaggtggagtgttgatgcaaaatggccaagtggtggcctatgcttctagacaacttatgactcatgagaggaattatcccacccatgatctatagttggctgttgtagtttttgcccttaagatttggagacattatctgtttggctctaagttcgacgtgtctagtgatcataagagccttaaatacttgtttagtcagaaagagctaaacatgagacaaatgagatggttagagtatcttaaggattatgattctgagcttagctacca

SEQ ID NO: 17932 - DNA, 378 bp, Glycine max
agtttctatactttatacaagcatgaagctttcataccacttgtagacaagtggcctcacatatcttaagaaggggggttgaattaagatattgcaaactatttcccaaattaaaattctatttcactttctatgcaagatacaaattcccttataaatgaactcttaaataatgattcaaatagaacaatctaactataaatataaaacaataatatataaaagagtttaacggaagagaaaatgcaaactcggatttatactggttcggccacacccttgtgcctacgttcagtccccaagcaacttgcttgagagttccactatcttgtaaaatccttttacaagttctgaacacacaaggacaatccttccttt

SEQ ID NO: 17933 - DNA, 358 bp, Glycine max
tctattttgctgagtgctgagcataaatttatagcctttattttgatttcttttttacctcttgtactcaactgttgacagatcaaagaggacaagtattttattcacaaccacttagcatttgtggttaagtatcatactgatccagagttagatttgtcaaggattgtaggatttgaggttacaccattcaggttgtattataattcttttccacctagtttctaatatagtcttgtacttatctattaatcttatggctaataataactgtacattgaaatgattcttatgaattcagcgtaaagcatgaatatgaaagttaatggaatgagaattcccgcttaactacctgtga

SEQ ID NO: 17934 - DNA, 361 bp, Glycine max
ttgctaaggtcggatatgcgcagaagatcttcctgcgaatatcttgattacagatcgcgccagaattcttcggctttgtacatccaaagtatactttgacgtatggaggtggccaccgagtgaactatccacgagacaaccatattgttacatcgacgccacgctccatgcattctatctgttttgacaggttcaggcgcgctgtcatttatgaactctactttgttcttggctctcaatgcaatgatcatggacctgctccatgagtggtagttactcgaatgtaagactgtggaaacacggactgtggccggtttctcgctcgtatggatgcagagataactctccatgttgttgatgg

SEQ ID NO: 17935 - DNA, 358 bp, Glycine max
atttatttgcaacggcaactatgttggtgataaagttgaaaggaaaaacacatgcggcagatgtcactttattggtggtaacttagttacgtggatatgcaataaactagactcaactacattgtccactgttgaagttggatatatgacaacaacaagttgatgtactcaacttctatggataaagaatcagctcgaagactacaacatctatgatagtcaaattcccatctattgtgataataaagctgctataagtctttctaaaaatccaacattgccttctagatctaaacatatacaaattaagcatcatttcatacaacccttaaccaaagacatcacgttctcaatggga

SEQ ID NO: 17936 - DNA, 379 bp, Glycine max
agcttcttagtctcagatgatgcagctgagtttgtagctacctcatgcactcctctaatgactatagcatcatttatggcgctaaactgctgggagttagaagccatcttctcaattaaattcctggcttcagcaagagtcatgtctccaagggctccaccactggcagcatctatcatacttctctccatattactgagtccttcgtaaaaatattggagaagaagctgctctgaaatctgatggtgagggcaactggcacatagttttttaaatcgctcccagtactcctacaggctctctccactgagttgtctaatacccgagatatctttcctgatggctatggtcctagaagcagggaaaattttttctaaga

SEQ ID NO: 17937 - DNA, 426 bp, Glycine max
tgacaagaaagcagaacctggaatttttgtaggttatagctcaacttcaaaggcctacagaatctacctaccatagagcaacaaagtaatcatcagcagggatgtcaaatttctggagtcagatagttgggactggaaaaatgataagaggtccgagtttcaggaggagaatgaagatgttgatgaagaacccataagaggaaccagatcactttcagacatctgccaaaggtgtaatgttgctgtgatggagcctgagggatatgaagaagctacagctgatcagaaatggataaatgcaatgaaagaggagcttacaatgattgaaaaaaataaaacatgggagctggtggacagacctaaccacaagaaagcgattggtgtcaagtgggtttatagaaccaagctcaatccggatggttctgt

SEQ ID NO: 17938 - DNA, 373 bp, Glycine max
agtctccgttgttcaattttgagcgtctcgatatattatgcgcctgaatctgactttcgagttaaaagttatgaccatttcaatttcacgagggcttctgttgttcaattttgagagtctctatatattatgcgcctgaatctgacatccgagttaaaagttatgaccattcgaatttctcgagagcttccgttgttgaatttcgagcgtctcgatatattatgcgcctgaatcggacatccgagttaaaagttatgaccatttgaatttcttataagcttccgttgttcaatttcgagcatctcgatatattatgcgcctgaatctgactttcgagttaaaagttatgaccatttgaatttctcgagagctt

SEQ ID NO: 17939 - DNA, 407 bp, Glycine max
tataagaaattcaaatggtcataacttttaactcggatgttcgattctggcgcataatatatcgagacgctcgaaattgaacaacggaagcattagagaaattcaaatggtcataacttttaactcggaggtctgattcaggcgcataatctatcgagacgctcaaaatttaacaacggaagctcttgagcaattcaaatggtcataacttttaactcggatgtccatttcaggcacacaatatatcgagacggttgaaattgaacaacggaagctctcgagaaattcaaatggtcataacttttaactaggatgtccgattcaggcgcataatatatcgagacgctcgaaattgaacaacggaaggttatgagaaattcaaatggtcataacttttaactcggatg

SEQ ID NO: 17940 - DNA, 381 bp, Glycine max
agcttgatttgaattaccatttcaaatgagcaccaattacgcttgcacccagaagagctacaagtcaagctcaaaacacagatagcaaacctcctcaactctagagttccatcaccaaacatctcccaccattctccaggttgcataacttttctagtgtcctttgcctcttccatagacaaaaaccctctagcaaaatcaaactcaacaagttgcaaattaattttttttcctttctacaacatccttgaccaatcttctcatacacatgtgcaacccttctttcacctgagggtcatcatgtctaaaactaggtttataatgcaaatgaggattactataatacgcagttgtatgcaaaggcttgtgaagctaatgatc

SEQ ID NO: 17941 - DNA, 416 bp, Glycine max
tgaatttggagaaatcctttttgagccgagtagccttattgtagtatctcgtcatgtgtggatcttcggtttgatattcttcattcaactgacctttgacgagattggagtcactccaacactttaggaacttagctcatatttgcaatgccacctaaaagggctttggacttggcttagttgtttgtcgtctcgaacttaaacctctatgattgctctagaattacttcatttgggctttctaggatgactccagccccactcccttttgtattggatgagccatctacacagagcttccaccacttgaattacaattttgtattgcttgatagcttgattacaaattttactatgcactgagacttcattgacccccttgattcatattttagcccaaacttggacaatttgat

SEQ ID NO: 17942 - DNA, 375 bp, Glycine max
taagcttgggatgaaacaaatgcgattcatcaaaaattacatctctactgagaagaactttcttttcagatggtgaccagatcctatagcctttcactccatcaccataacccatgaacagaccctttcttgatctaggtaccagttttccttcattgacatgataataagcattgcagccaaatactcttaggtttgagtagtttgctgttttgcaattccagatttcaataggagttttaagtcctatagcagtaaagggcgttctattgatcagaaaacaagttgtattgatagcttctccccaaaaacttctgttgagaccaacattatacaatagacatcttgttcttaccaggagtgttctgttcattc

SEQ ID NO: 17943 - DNA, 376 bp, Glycine max
  unsure at all n locations
agttggggcatagaggtagaccctgcaaaaatagctgttatttcacaattgccttacctctcttgcgtgtgagaggttcgttcttttcttggtcatgcacggttttataggagctttaccaaggattttagcaaagtggcccttccactatccaatctgttgcaaaaggaggtggagtttgattttgatgaccggtgcaaagaggcttttgattgcctcaagcgtgcggtgactaccacccctatcattcaggcacctgattggacagccccatttgagctaatgtgcgatgcatccaattacgcattgggggctatccttgctctanagattgataagctacctcaggagatctactacgcttccagaactttgg

SEQ ID NO: 17944 - DNA, 379 bp, Glycine max
agcttcactctgctcttcttttacttccacattagttatagtctatattgttttatgtatacgtgcatgatgagctacctcaaacttctaaattatgatcaattcacacgtgcgttatatcattctgattataagcacaacctacaattccctccaaaattttgtcacaagaaagcacttgtaagtttataaatcttgcctgcccacgaggtttagattgcttctttgcccaagtatgattaggctgatatgcccgcattgctctgtctctatctctggtgccttccatggattgctggtttatgtttgcggaccccagtaacacatattcatcatccactatcattccttttgaatgaacataaatcatgaatctccg

SEQ ID NO: 17945 - DNA, 371 bp, Glycine max
agctttggacaaggtactttaccaagaatgtgaaagtgggaataatagcaacaatgtgttgagttggaatcatagggtaaacattgctgttggtttggcttctgtgttgagttatttgcaccaagagtgtgagcaaagggtgattcacagggacattaagactggtaacatattgctagatgggagcatgaacccaaggttgggtgattttggtttggcaaagcttatggatcatgacaagagtcctgtttcaacactaactgcagggacaatggggtacttagctcctgagtatcttcagtgtggaatggcaaatgagaagactgatgtgttcagctatggtgtggtggttcttgaggtggcttgtggaa

SEQ ID NO: 17946 - DNA, 417 bp, Glycine max
tcgcaaatgtacttggttgttgcccagtttcatcatatcttccgtaatacttatcacctctatcatatctaataattttcacatttatgtctaattgtcattttacttcattgtagtaaatttctaaggaatccatttcctaagaaatctcgggcaataaatagacataaccgtaacgtgaataatcatcaataatggtgataaagtatcattcctttttgaaagaactaacaccaaaaggtccacaaatatcagtatgcacaatttcaagaagttgagtgcttcttgtagctcttttctttgtatgttttgcttgtttttcccttaatacaacccacacaaatatttagatccgtaaaatctagataaggaagaatttcattctttattaatctttccatcctttctctaaaaatg

SEQ ID NO: 17947 - DNA, 424 bp, Glycine max
  unsure at all n locations
tcaacctaggggagacggaccattccaagtgttggattatagatcaacgacaatgcctacaagattgacttgcctaatgagtataatgtaagtgccacttccaatgtgtctgatttatctcttattgatgcagatggaggagccttggatttgaggacaaatccttttcaagaaggagggagtgatgaggacacaactaagggcaaggaccatgaagcacttgaaggcccatgaccagaggcatacttaaaaaggcccaacacagtgatgaggacacaactaagggcaaggaccatgaagcagttgaagggcccatgaccagaggcagacttaaacaggcccaacacatcatagagataaggctggtcattngtatagctgccattgatgatgaatgaaggcccatgtttccataatttttatt

SEQ ID NO: 17948 - DNA, 378 bp, Glycine max
agcttttagtggtatttgactaattatggtttattgtacttgacttattagggtttagtgttacatgaccaattagggtttagggttatttgaaaagatagggttgcttgactaattgggtttaggggtatttgacaaataagggtttagggttacttgacgaatttggatttaggggtatttgactaatgaggatttatatgtagttgagttaattagggtttagtgttacttggccaattagggtttaggggtatttgacaaattagggttacttgactaataagggtttatgggtatttgaaaattaaggtttagggttacttgacaatttggggtttaggtgtatgtgactaattaagatttataggtacttga

SEQ ID NO: 17949 - DNA, 367 bp, Glycine max
  unsure at all n locations
agcttcccttttcaattacgagcgtctcgatatactacgggacacaagcggacattttagtcaaaagttattgtcttttgaatttgctcagagcttttgttttcaattacgagcgtctcgatatattacgggactcaatcggacatccgagttaaaagttattgtcgtttgaatttgctcagagcttctgttttcaatttcgagcgtctcgacatattatgggactcaatcagacatccgtgtaaaaagttatcgtcgtttgatttttctaatagcttctgttctgaatttcgagcgtctcgatatattacgggactcaattggacatccgagtaaaaagttattgtcgnttgatttttctcagagc

SEQ ID NO: 17950 - DNA, 375 bp, Glycine max
tcaagcttgagcacctttttcctcacttcttccttcattgatgggttgagccttctctagggttgtatgattggtctatagtctccttccatcattttcttgtgcatgtagttggcagggctgattcctttaagatctaatatgtgccacccaattgcttccatgtgtcccttgaggacctttaccaacctattctcttcctctgctgttagctcactgtgatcaccacaggcttggtctcgctctcctccaagaacacatacttcaggtggttgggtaggatcttcaactccaccttggtcttctcggatggactcccactttttaattcttcaaagctggtcccccttgcaggaatgttatcttcatgatcta

SEQ ID NO: 17951 - DNA, 376 bp, Glycine max
cgcatgcttttttcaacctataggtgatggaccattccaagtgttggagaagatcaacgacaatgcctacaacattgacttgcctattgagactaatgtaaacgccactttcaatgagtgtaatctatctgtttccgatgcagacggaggagccttggatttgaggacaaatccttttcaagaatgagggagtgatgaggacacaactaacgacaaggaccatgaagcacatgaagggcccatgaccatacgcaaacttaaacaggccgaacacgtcataaagacaaggctgggcatttgtatcgctgccattgatgatgattgaaggcccaagtggagacctatgaatgcccacatgcagaagcgctactaagac

SEQ ID NO: 17952 - DNA, 415 bp, Glycine max
tgaagatgtatagcccaccatcttttcatactgtgttatgtgtctactatgattggcatcatgtgatcttcgtcattgaggtgccacttgaactgccaagtctctccacctttgggcgtattcttttaaaagattcgtgcccccattttttgcacatgttcaataattgcatcctatccgaagccattatactaacactgcctaacgaaggcaaccattaggtccttccaagcatgggctcgggaaggttccaagttagtgtacctggtaacagctacccccagtaagactttcttggaaggaatgtatcagcaatttctcatcttttgcgtatgcccccatcttccgacaatacatctttagatggttctcggggcaagtagtccccttgtacttgtcaaagtctagcaccttg

SEQ ID NO: 17953 - DNA, 351 bp, Glycine max
tatttttgaatggaagctctggtctcttgctgaaactgcatgttctgcatagtcatttgcctcacaagttcttcgagggaaggttgtggaggggcctcaactgttagctgtttctggggttgttgctgttgttggattggtggaggaatgtatggtctgcttgggccagcaacattttggaaagaacgagcaggctgctgtagctgttgttgctgagggctggaccatctgaggttatggtgattactccatccaaggttgtatctgttgctggagaggtcataattgctctgctgcggatgattttgctgctgaggttgacgaggtctattgtaaatgtttgcagcataa

SEQ ID NO: 17954 - DNA, 369 bp, Glycine max
agttttgagaaagtaagcttcaaatgatctttgaatagaaatagattcctcagcctttgctaatgcttcttcacgatggccagtgtcatacagtatccatccttcatagacaagcctttcatgatcagaagtagaataatttctagccagccgcaaactacgcattgcagactttggacaattcaacctacaagattcaggaaaatcaacacccataatagtcaagctctggcattaaaatgaaaccaggactaagacacacccaaccagtttttcgaagtacttatcagtttccattcattctgaaagcagagaagatacaataactgaaaatcacctccaggactaacacttatgaaactatgcata

SEQ ID NO: 17955 - DNA, 413 bp, Glycine max
gcttgagccattaatcgacaataacttttactttgtgtctgattgagtcccgtcatatatcgagacgctcgaaattgaatattgaagctctgagcaaattcaggcgacatattctttttactcggatgtctgattgagtcctgtaatataacgagacgctcgaaattgaatgttgaacttctgagcaatttcaaacgacaataacttttttctcggatgtttgattgagactcgtaatatatcgagacgctcgaagttgaatgtttatgctttgagccaattcaaaccacaataactctatgctcggatgtctgattgactcccgcgatttaacgcgacgctcaaaattgaatgttcaagctctgagttaattcaaacgacaataacgttctactcggatgtctgattgagtc

SEQ ID NO: 17956 - DNA, 412 bp, Glycine max
actagctggacttcctgtgttgtgaaccttcttttcatctgtcccaaacccaatcacctggttcaagcacgactctctttctgcttttgttggcttgccttgcatagctcgcatttttcttttcaatttgaaccttcacttgctcatgcaacttcttcacatactcagctttagcctgagcatccttatgcttaaacatagcaatgttacgcatatgcaacatatcaagaggagtcaaaggattaaatccatacactatctcaaatggtgaacaattagctgtgctatggacagcccgattataagcaaactcaacatgatgcaaacaggcttcccaagatttatagatttttctttataacagtcctaagcagtgtgccttaagtcctattgactacctctacttgaccat

SEQ ID NO: 17957 - DNA, 379 bp, Glycine max
agcttgtacttgcctcttatcccttctatttgttggcaatttttcacactcctatgtctcaacaatagaatttcatatctaccatcatcatccaccctcttttcttagaaaaaacaacaaccttattgattgaaaacacatttattgagactcttattaggcatgtaatcatcaaccaacaaaagctcgttcctttttctacaatactattggatttggaccaagtttttttgttgtaacctctccatgatcgatatctccaccatgaattgttgtaacacttgcttctaatcgtggttcgcacatttcacagtaatttgagtgttattcagtaatgtgcttctacactctcacaaaccctccagaacctgacaacatc

SEQ ID NO: 17958 - DNA, 415 bp, Glycine max
tgaaagacatgcacaaagtgtgactatatgatgtggttattggtgtagtaagcaaatgctcacctccccctctaaaatttaattggattaggcttctaccaattcaattaaatttatttcccaacacacacatcaaatattcacttagtgcatgtgaaattacaaaactacccctaatacaaaaactagtctaggtgccctaaaatacaagggctgaaaaatcctatatttctagggtaccctacctacgttatggagccctaaatacaaggaccagatataatgacatcctaatctaatatgtacaaagataattggacccaaccttggcccatgggctcataaatctaccctgaggttcatgagaaccctacgaccttcttcaacagctctagcccaatcctcttagtgcctc

SEQ ID NO: 17959 - DNA, 416 bp, Glycine max
tctggtgggacatcttgacttgctttccaatctgactttttccacagattctgccttcttctattttcagattgggaatgcctctaacagcacttttgtcaaggattttcttcatgcctcttaagtgcagatgtccaaacctttgatgccatattctgacttcatcttctttggaggatagacatttggaggagtagctggtttcttggggtgtccataggtaacaattgtcctttgatctgctgcccttcattagaacttcactcttctcatttgtcaccaagcattctgactttgtgaagtttacattgaatccttcatcacacagctgactgatgctgatcaagtttgcagtcagtcccttcaccagcagtactttgttcagactatgaagtccatcatgaactagctttccc

SEQ ID NO: 17960 - DNA, 368 bp, Glycine max
ttgtttgttgcaattcttctagacttagagtgataacatgcagtcctcttgatcccttatctctcactgtctcgatatgccgagactccgaaaccacaacaagttttatcttttccatgtactcgaaacaaaactcagtagcttgtttcgcaatgtacttttcaacaataaatgcttgaggacggtgtagattctttgtatacccttttaagatcttcatgtatcgctcaaccgggtacatccaccgcaaataaatgggaccacaacatttaatttccctcaccaaatgaacaattaagtgaaccgtgatgtcgaaaaatgaaggaggaaaatacatctccaactgacacaagataatagtagtctca

SEQ ID NO: 17961 - DNA, 404 bp, Glycine max
tgtatgactaccatggtatcaaaattgaactctattttaccagaaacactctcatcaggaatgtgatgaagctggaatgcaaagttcaccactaatgcttcatctggactgcagttcagcattgatgtggtgacaatggaagtccttgatgccactgctcgaagtttgagtcaagttcagcatttataatttcattgatgtcttaaaaggtaacctgtggatgtgcagctggagttgctgcagcatttagagagctccagtttgtggtgtattgtttgctttggaagaggttacatcttaattggtatggatttttatttcttgatcaaagattctgtttgcttagaagcatgtgcagtaaagatagtggtgtctgtacttaaattttgttgcttgtgctcttg

SEQ ID NO: 17962 - DNA, 404 bp, Glycine max
tgctaacccatggaacctcctaatatctcccacactttgtggggtgggccattcttggatggccttgaatttctcagggtccacttggaccccatttctaccaactactaaacctaagaaaactatattatctacacaaaaggtacacttctctatatttgcatatagggtgttcgtcctaaagactgaaagaacttgtctgaaatgtcctaagtgatcatctaggctcctactatacactaaaatatcatcaaaataaacaactacaaatgtacctatgaaatcctttaagacatgatgcataagcctcatatacgtgcttggtgcattagtgaacccaaaacgcatcactagccattcataccaactaaacttgggattgaaagcactttttcactcatcac

SEQ ID NO: 17963 - DNA, 413 bp, Glycine max
tgaaggcaaaccggatgcattggttaacttggtaacctagctggccttgaatcagaaatttgtacctgtcgcaagggtttgtggtttgtgctcctctgctgaccaccatacagacctttgcccttccatgcagcaacctggagcaattgagcagcctgaagcttatgctgcaaatatttacaatagacctcctcaacctcaacagcaaaatcaaccacagcagagcaattatgacctctccagcaacagatacaaccctggatggaggaatcaccctaacctcagatggtccagccctcagcaacaacaacagcagcctgctccttccatccaaaatgctgctggcccaagcagaccatacattcctccaccaatccaacaacagcaacaaccccagaaacagccaacagttg

SEQ ID NO: 17964 - DNA, 379 bp, Glycine max
agcttatttagcgaccgtatttaactaatttgtgaccgattgttgtggtcactaaatgatgttcttttccttgcagtgaatgccaacaatatccttgagttttttttggcatggagaaatgcaatcttgaaacctccatggaaattctgagtttcactatttaattctttcttttagcattaggagcgaggctttgagtatgagccttgaaataggcaacaaattggtccttaagtaggcataacttctttgacacctgcatggttgcgaaagtcttggctccatctgaagagcttaggaaatttctcacatgtgaacaattgcagcccatttatatcttgaattataggtatgaatacaacaacaatatccacataac

SEQ ID NO: 17965 - DNA, 418 bp, Glycine max
  unsure at all n locations
cgcttncatctggaaaggtctgccaattaggtgtcttttcaactatatgatcactaacagaaagaaaccactctatctctcgtcgccacattgctttcttctctgaacgcaggggctctaatctccaaagttggccaaagagggtagctgcaaattcagcaaagaaatgaacaacaacaatcaaagtcaagaatagcaaatgaataaaattcaccacaccaattaataaaaaataaaaacacagtaactgcttcaagtgtgcattttgcataccacatagattggttatggcatttgagatagccaaggctgtagcgaccccatttccacaacctgacatatcttctccaagtaacaattttgcaaacctctccttcatcatctcaatctctacaagtgagaatgaaaatcaaatctc

SEQ ID NO: 17966 - DNA, 371 bp, Glycine max
agctttatgccttaataagagccctccaaacttgggaacattaccttgtttccaaggaatttgtcattcatagtgatcatcaatcacttaagtacattagagggcaaagcaagttaaacaagaggcatgcaaaatgggtagagtacctagagcaatttccatatgttatcaaatacaaaaagggaaaaacaaatgtggtagctgatgccctctctaggagacagacattgttttgctccctaggagctcaaattttaggatttgataatattagggacttgtatgctttagatgaacatttctctcccatttatgagagttgtgggaaaaaggcccaagatggattctatttggctgaggggtatttgttc

SEQ ID NO: 17967 - DNA, 424 bp, Glycine max
ctcagcttctataaaaggttcgttcctaatttctctacaattgcatcacctctcaatgagctggtgaagaagaatgtggcatttacctggggtgaaaaacaagagcaagcctttgctttgctccaagaaaagcttactaaggcacctgttctagctcttcctgatttttctaaaacttttgataatattagggacttgtatgctttagatgaacatttctctcccatttacgaaagttgtgggaaaaaggcccaaaatggattctatttggctaaggggtatttgttcaaagagggaaagctttgcataccccaaggatccattaggaaattacttgttaaagatagccatgagggtgggctcatgggccactttgggatagacaagacgctcgtcttactcaaagaaaagttttattggcccc

SEQ ID NO: 17968 - DNA, 379 bp, Glycine max
tttgtcttattaaatctatatatggcttaaaacaagcctcccgtcagtggtaccttaagcatcatggacaatttcttcatttggttttgacgaaaaccccatggatcaatgcatataccacaaagtcagtgggagtaaaatatgttgtcttgttttatatgtatatgatattttacttgcagccaatgattgaagtttgctagatgaggtgaaacaatttctctctaagaattttgacatgaaggatatgggtgatgtatcttatgtcatcgacattaagattcatagagatagaccttgaggtattttaggtctatcacaagaaacctatattaacataatttcaaagagaatccagatgagagattgttcaccaagc

SEQ ID NO: 17969 - DNA, 381 bp, Glycine max
gtgtttgtctgcttgaaggtaaactagatgccttggttaacctggtaacccaactggccatgaataaaaaatctgcacctgtcgctagactctgtggtttatgctcctctaccgaccaccacacagacctttgctcttctgtgcaataatctgaagcaattgaacaacctgaagcttatgctgcaaacatctacaatagacatcctcaacctcagcagcaaaatcagccacaacagaacaattatgacctctccagcaacaggtacaatcccgggtggaggaatcatcccaaccttagatggtcgaatccttcacaacagcagcaacaacaacaacaaccttattttcagaatgctgctggctcaagaagaccatacgttc

SEQ ID NO: 17970 - DNA, 381 bp, Glycine max
  unsure at all n locations
agctttgggattattcacatgagttaacaagaagcaatgaatgatcaattgtgaaaatgaattgcatcccatacctagatcttctccataattccaccgaatttatatgtgtatagatgcatgcaagcaaggagtggtcttgatggttgttttctgaaaaggtactacggcggtcatttacttgcagcagtgggacaatatgaaaacaatgcattttttgtgattgcatatgcaatagtaaatgttgaagataaagacaattggaagtggttcctcacattgttacatgaagacattggagactacgaacaatatggctggaatttcatgtcagacatccaaaaggtgcaattcaattgtcttgctttgagtaattntgac

SEQ ID NO: 17971 - DNA, 419 bp, Glycine max
tctataaattagaattttagtgtaatgaataagattatatattgatacataaaaaaattctatttctattactctaataagttgactttaaagatgtttacctttaattgttaattctcttcaggaatttagacgtatcaaggggaacataaactcaatgagggaacatgcagagcttttgagttctgtcagggatgatattactgactttaaggtgaatcatgagtttgatttgaattaaattacaaagctattttctcatagctgtactagacttaccttcttctggcagacatcaggcagtatgtcaccaaggatgcagttactacgtgagagagctgccatccatggaagtatatctcatgtaagtatttataatatgaaatatgatgaatttgtattcttctacttgaaattct

SEQ ID NO: 17972 - DNA, 417 bp, Glycine max
tcacacaatggttcatcacttttctgatggaagctcaatatatttgtcttagcctggtttcttttttcctcttggaagaaacagtctaaaaacttgtttccaatgtcactccaagtgataaggctctgagatggatgagtattgagtcacttcaaggcattatctcctatgacggaaaaatggaaaaccatcatatagagattctcctcttcagtttgggtcacccctgttgtaccacattgatcataaaatgtggccagatggttgtatgggtcttcattagctaagctaggaaatgcatgttgggcaaggaaagtgattaggcctaactttagcctttgttgtgtggttgttgctccttggtctagcaatgttgaagtatactcgtgaaccattatcagtgtcatggtccgcaag

SEQ ID NO: 17973 - DNA, 375 bp, Glycine max
  unsure at all n locations
tctttgctntgcttatacacataggaggaagaattctatcattcataataatcttatccgatttaaataaaattatgtataagaaaatatacttgtgatgtacaattaaaaaaatcaaatttgagcaatatttatttttcttgatcaaaagtcaaaactattcatttcttgacgattccattgaggttgtaatgagtagaaaggcaataggcagaagatgccattcaatcaatatagtaaggatatctattggtttacatggtgcaagtagacatatataatatggattgaaatttttagagcattgaaatcaaatcaatttacttataatatataaaaacatatttcaattttaatgcatcaaaccttatagat

SEQ ID NO: 17974 - DNA, 365 bp, Glycine max
  unsure at all n locations
agtcttgattgagttgatgcatcacgtatcaatttcactttaaaagcgggtcctaattggattcctaattttcaacttacctatatggatgtgacatcatggcatataagtcccaactttccatcgtggattcagtcacaaaacaaacttcaatatgttggactgtctaacacggggattttagattctattcccacttggttctgggaaccacactctcaggttttgtatttaaacctctctcataatcatatccatggtgagcatgtgactacattacaaaatccaatatctatccaaactgttgatctaagcacaaatcacttatgtggtagattaccctatcttcanatgatgtgatgact

SEQ ID NO: 17975 - DNA, 425 bp, Glycine max
tgtaagatttgcaagatcatcttccttgacaactctttgaattagattgccgtcaatatgaagagataacaatttagagagtgatcgaagactttcaaatggatttccaatgaatttattcatagagagatcgagatatcttaatgatgaaagttttccaaatgatctaggaagagcaccaccaattgagttgttggaaaaaagtaacgtgtcaatatttttaaatgccccaatatgatctgtcagattgcctgaaagtcgtgaactctgaactgcaagtgttgtgagtccatgggaaatacaacgagcaagaatttctaaaagttcattaacctgttggttgagtttgagatatgataaatctatcacccttaagttgcagagagtacccaaagaagttggaatcgttccttcaagatgattac

SEQ ID NO: 17976 - DNA, 418 bp, Glycine max
  unsure at all n locations
tgcagagaanactaaaagaagaagaatgaaaagaatgccaaattatcaatgaatgaaagttagcttacaatgattaaatattacagtttatatagttagttacaagattaactaacttgtagttagttacaagagtaactaacttgtaactaactaactttaactcactctaactaactaagctaattctaactctagttacatgataacttatgctaatagcccccttcaagctaggaatgaatgttagacgtgcctagcttggaatacaaaaattgaaaaacaccaggcagcagagctttagtgtaaatatctgcaagctgatttgcagaggaaataggaagcaatttcacaagcctagtcatcaccttctcttgaactatatggcagtcaatttcaatgtgttntgttctctcat

SEQ ID NO: 17977 - DNA, 382 bp, Glycine max
  unsure at all n locations
agcttatgctattccaagttcattaatcatacctttaagccagattgcttccttcactccttcagctaaggccatgtattctgcttcaggtgttgaaagagcaacaattgattattgatttgctttccaactaattgttgtaccacacaaagtaaacacatatcctcttaaggacttcattgtgtctacatttcctgcanaatctgcatctacatagcttgtgattgctgcctcgtgtgctgtcttcttgtaccttaaaccagctttcaaagatccatgtagataccttagtgtccacttcacagcttcctagtgtgcgctgccaggatctcccatgaatctgcttataatacttatagcatgagctaagtcaggtctactg

SEQ ID NO: 17978 - DNA, 364 bp, Glycine max
  unsure at all n locations
agcttatngatctcaaacaattgctgaaaggctggagcagagatactgtaggtgacttgtgctttaaggttaagcagctgtagcaaaagttgaatgaattggaagattccatgtctcaccaaccttctgaccagcaagtccttcagttgaagaatattcaggctgagctatgggaaaaggctaagttgcaggaatcctttgttaggcagaaatctaaatggattaaggagggagatagcaatagctcctatttccataaaattatcaatttcagtaggagaagaaacaccttgagggggctgatgatggatggtacttgngtagaataccctgatttgattaacgatgaagttctacagcattt

SEQ ID NO: 17979 - DNA, 398 bp, Glycine max
tcaagtttaaacattcaacttcgagcgtctcgatatattacgagtctcaatcaaacatccgagaaaaaagttattgtcttttgaatttgctcagacgttcaacattcaatttcgatcgtctcgttatattacaggactcaatcagacattcgagtaaaaagttattgtcgtttgaattggcttagagcttcaacattcaatttcgagcgtctcgatatatgatgggactcaatcagacatccgtgtaaaaagttattggtcgttgaattggctcagagcttcaacattcaatttcgagcgtctcgatatatgacaggactcaatcagacatccgagtaaaacgttattgtcgtttgaatttcctcagagcttcaacattcaattttgagcgtctcgta

SEQ ID NO: 17980 - DNA, 402 bp, Glycine max
  unsure at all n locations
ntgagccaattgaaacaacaataacattttattgtttgtctgattgaggcccgnagtatatcgaaacgctcgaaattgaatgctgaagctctgagccgattcaaacgacaatatctttttacacggatgtctgattgaggcctgtaatatatcgagacgctcgaaattgaatgttgaacctttgagcgaattcaaacgacaataactttttactcggatgtctgattgagtcatgtcatatatcgagacgctcgaaattgaatgttgaagctctgagccaattcaaacgacaataacgttttactcagatgtctcattgagtcctgaaatttaatgagacgctcgaaattgaatgttgaacctctgatctaattcatacgacaatatacttttacacggatg

SEQ ID NO: 17981 - DNA, 423 bp, Glycine max
tcacaggcaagcttccatcagttcttcacttaaactcttgcatgagtcatgacttgtataggagacatgtttttttcttttcatttctttcattatttttcttctttcgtcttctcttatattctctctttcatcttgacttatttcttccacttttttctctttttcttttctctcttgtttttttttcacaatttaagggatcttaaatcatttaatctcctatacaaggggtacttaggagtagaaccctcaccattaacactagatgaagaatgaagactcatgttggttcctaagtcgtggttccatcttgttgggggtttgaaaacaaaaggtaaaagaaactatcattgaaaatagccaaaataaacactacaagaggtgtgaaagataaggtaaaaactaattggtaaaaaacac

SEQ ID NO: 17982 - DNA, 395 bp, Glycine max
tctagcttgaatgtaggagaagattatatgaggagaatgagagatagaacacgaagttttgtgcctcaaaagaggtctaaacattgaagtgtaattctcaaataataaaagttgaaaaaatgcacacacatggcctctatttatagcctaagtgtcacaaacaattggagggaaatatgaatttctattcaaatttcacttgaatttgaaattgaatttgtggagccaaattctggagccaaaatttcagtaattattattagtgaattctagttatggttcagcccactaatccaagatcaagtccaagattctgcactaagtgtgcttaggtgtcatgaggcatgtaaagcatgaaggacatgcacaaagtgtgactatatgatgtggcaatg

SEQ ID NO: 17983 - DNA, 376 bp, Glycine max
ttagttttcatgcacatggaatttatctacaaatcttctgaagtcaatttttagcactccccaaaattctttaatgaaattgaagttgaatccatcaggtccaggacatttgtccccaccacaactccacactgcttctttgatcttatgatccgagaaaggagcaatcaattcctccctctgcctttggttaattgaagagaattgtactccatcaagggtgggtctgaaaagctgttgttcagtgaatctgttgagaaaaaaaattcacagcttcattcttaacttcattgaggttctaaatccttacaccatgaatgagaatcctttgaagaccatataatgtctcttggaattataagttatggaataagct

SEQ ID NO: 17984 - DNA, 392 bp, Glycine max
  unsure at all n locations
agcttgttatccgagtagactactccgagaatggtggcattgactaccccagttgaaatgttgacactgttacctaatgcattcacattcagcggaagccttgcagggtctttaccagccactgtctgcacagggttgcttaaggaatcgaagtttgagctcgacacaaactctggcaatatgtggaactgcactaattcgattttctggccttcgtttaaggagttgaggaagcctgctttgaggttggaaaaggcagaatcatctggtgcaaggatggttatgccgccactcttggctgttatgagctgtgagttgatgttgttcatgatttctgtggttntgaggaggcggattangactgagaacattnnttgccttttcaggattct

SEQ ID NO: 17985 - DNA, 311 bp, Glycine max
agcttgataacaagtgaaaatgtctgtataatttgtgccatactgctgatgaaaacccttagccaccaacttggctttgtacttgttaacaatgccatcagagttttctttcacctaaaacacccacttgcaaccaatggaagttttgttaggaggtataggaactagactccatgttttgttttaaatcaaggcatcatattcagtttgcatagcagccaaccaagtagggtcagccaaggcttgcttggtggatttaggttctaaatgggtcagaataagggtaacgtgaatcttgtgttgaacaatac

SEQ ID NO: 17986 - DNA, 393 bp, Glycine max
  unsure at all n locations
attcttgatgtagagaagttatggattataccattctttttatagaatgatctaaactcagcatttttaaacttagttccatggttgctccgaatagaagagatgtaaaaacctttttcattttggactattttatagaatatttcaaagaccttaaaagactcattcttatgagcaaggaagtatacccaggtatatcttgaatagtcatcaattatgacaaagccatacttttttcctcctagactcaatgttctagttagtccaaatagatccatgtgcaatagatgtataggtctggaagtggaaacaacatctttagatttaaaagaggttntgatttggttgccttgctgacatgcttcacagagaatatgagttttccaacagatc

SEQ ID NO: 17987 - DNA, 320 bp, Glycine max
  unsure at all n locations
tcaagtcttcttgagaagattcctaaagaagctagagcttagctacacacaccgccctaagaactaagctgacctccgtgagatgagaagctcaagcttacaaaagaagtgcctacaacgaagactactcagaatgccctgaaatacaaggctaaaatcctatactactagaatggccaaaacacaaggcccaaaagaaggaaaaacctattctgatatttacaaaaaagagtggatccaaccttgacccatgggctcaaaaatctaccttaaagttcatgagaaccctanggcattctttagtagctctagcccaatcc

SEQ ID NO: 17988 - DNA, 418 bp, Glycine max
  unsure at all n locations
ctcgacccgggatcctcttagtcacctgcagcattttatcttctagaataatggcctctttctaacttcttattcccagaaggaaattcaatacataggcctcctatttttaatggagaaggttaccactactggaaaacccgaatgcaaattgttattgaggcaatagacttaaacatttgggaagccatataagttagaccttatgtacccaccatggtggctggaaatacaacaatagagaaacctatacaagagtggtatgaacatgacagaagattagtgcagtacaatttataggctaaaaacatcattacttctgccctangaatggatggatatcttacggtttcaaattgtagagtgctaaaatatgtgggacactctacaagttacacatgacggaacaactgatgtc

SEQ ID NO: 17989 - DNA, 419 bp, Glycine max
tcaagaaaaagatggcctcagcaaattccttatttctctgaaggttaattctatcaatagacctccaatctttaatggagagggttaccactactggaaaacccgaatgcaaatttttatcgaggcaatagatctaaatatctgggaagccatagaaatagggccttatatacccaacacagtagaaagagtttcaatagatggtagttcatcatgtgaaagcataaccatagaaaaacctagagatagatggtctgaagagggtagaaaacgagtacaatacaacttaaaagccaaaaacataataacatctgccctaggaatggatgaatatttcaaggtttcaaattgtaagagtgctaatgaaatgtgggacactcttcgataacacatgaaggaactacagatgttaaaagatc

SEQ ID NO: 17990 - DNA, 339 bp, Glycine max
agcttgtgcctcttcacgtctggaatatgaatagcatatagatccaaagacccttaggtgctttgctgatggcttcttcccgttccaagcttcaataggagtcttgtcttttacagacttagttggacatctgttgagtatgttaacagcaatgtagactacttcagcccaaaatgtgttaggtagtcccttctccttgagcatcgatctagccatttccataactgtgcgaatttttctctcagacactccattttgttgatgagaatatgcgactgtaagttttcgctcaatgccttcatcctcacaaaaactttcaaacttgcgagaggtgtactc

SEQ ID NO: 17991 - DNA, 394 bp, Glycine max
ctataacactcagcttaacatctaccacttccaggtgctggaactacttttcatttacctgtcttggcccatgcaagttgaaagccttggtggattaaagcatgcctatgttgttgaggatgatttctccatatttacctgggtcaactttttcagagagacatcagacaccttagaagtattcacagagttgagtctatcacttcaaagagataaagactgagtgatcaatagaattacgagtgaccatggctgagagtttgaaaacagcaagtttactagattctgcacatctgagggcatcactcatgagttttctgcagtcattacaccactacaaaacggcataattgtaaggatatacacgactttgcaagatgctgctatggtcatg

SEQ ID NO: 17992 - DNA, 422 bp, Glycine max
  unsure at all n locations
tcttagttntagctgatgaaaatgaattcctggcttcttcattcactcctctaatgacaatagcatcatttttggcgctacattgctgggagttggaagccatcatctcaattaaattcctggcttcaacaggggtcatgtctccaaaggctccaccactggcaacatcaatcatacttctccccatgttactgagtccttcataaaaatattggagaagaagctgctcagaaatctggtggtgagggcaactgacgcgtagttntttaaatctctcccaatattcatataggctctctccactgagttgcctaatgcctggaatatcctctttgatggtcgtggtcctggaagcagggaaaatgttttctaaagaatactctcttgaggtcatcctggctcgtgatggaccttggagcaag

SEQ ID NO: 17993 - DNA, 421 bp, Glycine max
tataggaagtgaaagaattagcatgggcagaaatgtttccgctttgattggtaaatctgttccccaaatccctgaataatgtaaagatccaagtacattaagcataccttgtattataggaaacagtaagtttgacaatgccatgctagatttatgagcttctgttagtgttatgcctcagtctatttttaattctctatctcttggtcctttgcagtcaactgatgtggtaattcatttagctaatagaagtgttgcctatcctgctggtttcatagaggatgtcttagttagagttggtgaactgattttccttgttgatttttatatattgaatatggaggagggattctctcaaggatcagttcccatcattctaggcagaccttttatgaaaactgctagaactaagatagatgta

SEQ ID NO: 17994 - DNA, 409 bp, Glycine max
taatatatcgagacgatcaaaattgaacatcggattctctcgtgaaattaaaatggtcataagttttaactcggatgtccgattcaggagcttcacatatcgagatgcacgaaattgaacaatggaagctctagagaaattctaatggtcataaattttcacacggaggtcctattcaggcgcttaatatatccagacgctcgaaattgaacaatggaagctctcgagatattcaaatggtcataacttttcactcggatgtccgattcaggtgtatcacatatccagacgcttggaattgattagcggaagctctagagaaattcaaatggtcataactgttcacacggaggtcctattcaagcgcttaatatatcgagacgctcgaaattgaacaacggaagctctc

SEQ ID NO: 17995 - DNA, 420 bp, Glycine max
gcttaatggcttaatgaggatggagaggagcacgtaatgtagcctttggtgttggatattaccattggagggtacaatgattaagtcctatgtgatgttgatgctatggaggccagccacttactcttggggagaccatggccttttgataagagggctagtcatgatggtttcaccagaaagatctctttcgcgtctcatggcttaaagatcgtgctcaaactattgagtccccaagaagtgtgcgaggatcatagaaaattgagagagaaaattcttctcgagaagaccgataatggaaaagagagtcaaacacttgagagttcatatagtgaggacacaaagagggaaacacatgagagaatattgatgagtgaaacacttgaagtgagggagaatttctagttacaaaaggagagc

SEQ ID NO: 17996 - DNA, 404 bp, Glycine max
ctcacaaaatatatatagtgtatgctgtatgttagtttaaataccttacatgtgcgtgtatgtggacaaaataaacacttcacaaaatatatatatgtatgtttaggtagaaagataccttaaatatgcatgtatgtaaacaaaaaaatacttcacaaaacatatatatgtatgtttaggtggcaagataccttggatatgcatgtatatagcaaaaatacctcacaaaaatatgcacatgtatatgtagcataatacctcatgaaaaaataagaataaaacaacaggcgcgataaagatataaacagatgataatgattataaaaaagaaggagaaaaaagaaaaaataagttgtcaagctgaaaaaccaacatgcgtttgaaaagagatgaacttcaacttt

SEQ ID NO: 17997 - DNA, 357 bp, Glycine max
  unsure at all n locations
agctttgttattctcctgttttagctntacccgattttactcaaccatttgaagttgaatgtgatgctagtggagttggcattggggctgttttgatacaaaacaaaaggcctatagcttatttctcggagaaattgggaggagccagattgaactattgcacctatgacaaagagttctatgccattgtgagagctcttgatcattggaatcattatttgcgttctaatcactttatattgcattcagatcatgagtcattgaagtatatcaatgggcagcagaagttgagtccaaggcatgctaaatgggttgaatttcttcaatcttttaatttctctttcaaatacaaggatg

SEQ ID NO: 17998 - DNA, 423 bp, Glycine max
ctgagcaaattcaaacgacaataacctttttactctttatgtcggattgagtcccgatatatatccagacgctcgaaattgaatgttgaagctctgagcaaattcaaacgacaataacctttttactcagatgtcggatagagtcccgtaatatattgagacgctcgaaatggaataccgaagctctgagcaaattcaaacgacaataactttttactcggatgttcgattgagtcccgtaatatatcgaaacgctcgaaattgaatgttgaagctctgagcaaattcaaacgacaataaatttttactcggatgtccgattgagtctcgtaatatatcgagaagctcgaaatggaaaaccaaagctctgagcaaattcaaacgacaataactgtttactcggatgtctgattgagccccata

SEQ ID NO: 17999 - DNA, 415 bp, Glycine max
tactcaagcttcatgagagagtcaaagatcaaattgagaggaaaattataatctatgcttaacaagccaacaaagggagaatgatggttgtcttcgaacccggagattgggtttgggtgcacatgagaaaagaaaggtttccggaacaaaggaaatcaaagcttcaaccaaggggagatggaccatttcaagtgcttgaaagaatcaatgacaatgcttacaaagttgagctgcccggtgagtataatgttagttccaccttcaatgtctctgatttatctctttttgatgcagatggagaatccgatttgaggacaaatccttctcaagagggagagaatgatgaggacatgaccaagagcaagggcaaggatccacttgaaggacttggaggacctattgatgacgacatgac

SEQ ID NO: 18000 - DNA, 291 bp, Glycine max
agtctgtagccaactggatgcattggttaacttggtaacccagctggccttgaatcaaaaatctgtacctgtcacaagggtttgtggtttgtgctcctctgctgaccaccatacagacctttgcccttccatgtagcaacctggagcaattgagcagcctgaagcttatgctgcagatatttacaatatacctcctcaacctcagcagcaaaatcaaccacagcagatcaattatgacctttccagcaatagataccaccctgcatggaggaatcaccctaacctcacatg

SEQ ID NO: 18001 - DNA, 379 bp, Glycine max
  unsure at all n locations
agttttctattattcattgtgacaatacaagtactgtatcccttactcataatccagttcttcatgctcgcactaaacacatggagttagacctattttttgttcgtgaaaacattttaaacaagttgctcttagtgatttatgtgcttgccaccggtcaatatgttgaaattattaccaaatctttatctcttaccaactttgaagctttcaggtttaagctcacactgtgtgatccctcaaattcttgtcagtctcacccactgatggctccccactgcagttactttttgtgcatttatgtcttaagggaaatttcaatggggggttntatcaccgganagcgcaccaagttgtcaagtatttaaaattaaaacgg

SEQ ID NO: 18002 - DNA, 336 bp, Glycine max
  unsure at all n locations
agctntgctattccatgctcaattgtgaatctttttgtaggtaaaacactactggatttgggagcaagcattaatcttatgccaatttcaatgcttactaaagttggagatgtggagattaagccaacaaggatgacactttaactgacagatcaatcaaagttccatatggagtaatggaagatgtgctagtgaaggtggataaattcatattcttggttgactntgtaatcatggatatggaagaacatgttgaagttccttttattcttggaagactattcatgatgacaactctagcattgattgatgtaaacaatggcaagctcaaaatac

SEQ ID NO: 18003 - DNA, 422 bp, Glycine max
  unsure at all n locations
tggatttcctttagtagggaatctatccttcctaagatggagccaaatccagtcaccgtcattaagaactagctcttttcatcctctattgcctttagttgaatacacctttgtttggttctctatttggttcttaaccctctcatgcaacttctttacaaactctgacctagattctcattctttatgtataaaagaagtgtccagtgggaggggaatgaggtctaacggtgttaggggattgaatccatagacaacctcaaaaggggattgcttggtggttctatgaacccccctgttgtaggcaaattctacatgaggaagatattcatcccaagacttatggttgcctttcagaagagcccttanaagggtggataaagatctattcactacctctgtttgcccatcagtttgtggat

SEQ ID NO: 18004 - DNA, 393 bp, Glycine max
  unsure at all n locations
agctttacttaaggtttgttcctaatttctctacacttgcctcacctctcaatgagctggtgaagaagaatgtgtcattcacttggggtgaaagacaagagcaactcanagaaaagctcactgaggcccctgttctagctcttcttgacttttctaaaacttgagctagaatctgatgcttctcgagtgggtgtaggagctgtattgttgcaaggtgagcaccctattgcttattttagtgaaaaaattcatggtgccatcctcaactatcccacctatgataaagagctntatgccttaataagaagccctcaaacnttgggaacataccttgtttccaaggaatttgcattcatagtggatatgaatcacttaagtacattagaagggtaa

SEQ ID NO: 18005 - DNA, 386 bp, Glycine max
agcttccattgttcaatttcgagcgtctcgatatcttatgcgcctgaatctgacctccgtgtgaaaagttatgaccatttgaatttctcgagagcttccgttgttcaattttgagtgtcttgatatattatacgcctgaatcggacctccgagtgaaacattatgaccatttaaatttctcgagagcttgcgctgttcaatttcgagcgtctctatatgtgatgtgcctaaatctgacctccgtgagagaagttatgaccattttaatttctcgagagcttccgttgttcactatcgagcgtttcaatatattatgcgcctgaatctgacctccgtgtgaaaagttatgaccatatgatttctcgagagcttccgtggtcaatttg

SEQ ID NO: 18006 - DNA, 423 bp, Glycine max
  unsure at all n locations
nttcactcggatgtccgattcaggcgcataagatatctagatgttcgaaattgaacaatggaatcgtttgagcaattcaaatggtcaaagcttttcactcggatgtccgattcaggcgcataatatatcgagacgttcgaaattgaacaatggaagctcttgagcaattcaaatgatcataacttttcactaggatgtccgattcaggcgcataagatatcgagatgttcgaaattgaacaacggaatcttttgagcaattcaaatggtcaaagcttttcactcggatgtccgattcaggcgcataatatatcgagacgctcgaaattgaacaatggaagctcttgagcaattcaaatgatcataacttttaactcggatgtccgattcaggcgcataatatatcgagacattcgaaattgaa

SEQ ID NO: 18007 - DNA, 413 bp, Glycine max
taactaatcagatgggacaattggctactcttttatatcaacaacagtcccagaattctaacagattaccttctcaatctgtctagaatctcaaaaatgtgagtgccattacattgaggtcgggaaagcagtgtcaaggacctcaaccagtagcatcttcctcatccgcaaatgaacctgcccaacctcactctactccagaaaaagatgatgacaaaaatttaaagagtaagttacctaacaatttctatgcaggtgaatcttccactagtaattctgatttacagaagcagcatatccctcttccattccctccaagagaaatttccaacaaaaaaaatggaagaggcagagaaggagatattggaaacatttagaaaagtagaggtaaacatacctctgctggatgcaat

SEQ ID NO: 18008 - DNA, 144 bp, Glycine max
  unsure at all n locations
agcaagtttatgttctgctttatncggancgccaggaggctattgaggatgtttgcatcaatgttcatcaaagatattaggctaaaattgccttttttggttgcgtctctgtcccgctatggtatcacgatgatgttagcctca

SEQ ID NO: 18009 - DNA, 339 bp, Glycine max
  unsure at all n locations
cattcaaccttccaagaaaaagtaatggccgttggaatttcctctgaccttcaacattcaattccgagcgtctggatatattacgggactcaatcagacatccgagtaaaaagttattgtcctttgaattggatcagaggttcaacattcaatttcgagcgtctcgatatatttcnggactcaatcagacatccgagtaaaaagttattgtcgtttcaattggctcagaggttcaacattcaatnttgagcgtcccgatatattacgtcactgaatcggacatccgagtaanaagtattggcgtttgaattgctcaaagcttaacatttcaattcgagc

SEQ ID NO: 18010 - DNA, 308 bp, Glycine max
aaaagatagttggaggtctgctgcatacttattcaagtacctaaattatgcaagggaatcgttctttgtttaaaacttaaattattaaaaataattataaatgcctctttacatgaaccctctttataatctgtttagatgggctaacttatagcatagcgggtctgttttttacctggtgtattttgaaatattataaattcacaggaagttacaaagatggttcagagtgttcctgtgtaccccttacccagttttcccaatggtccatctacatattatactatatgtcaaaccagaaattgaat

SEQ ID NO: 18011 - DNA, 316 bp, Glycine max
  unsure at all n locations
agctntatgtgaagatttgtgaaagtgtaacctgttcaatgacatttgaaatattcatagtgtctctagtagagaaaacagtcaaaagtcacttctttattatttgcttactttcccaaccaaatgttcaggcccagttctccatcccccacactcttatatgagaacctgactttacgttttcacatataatggtatgtagttcttgcatgaatcanataatccatctaattcaccagtctcataatctagtttatgacatatcaccagagactaaggactggtgtctgtaaactgtganagggccaagttgatg

SEQ ID NO: 18012 - DNA, 195 bp, Glycine max
catggatcttacttgctggctctgagggggtggatccactgagctagaacattggctccctggcttcacccccttttctgggagtgaatgagtctgtctcgctggcattccaggagccactatggtatgaaaaacaaaaactcctgtagctagttcggtgtctgaccaaatggctgcccaagttttgcttgaaac

SEQ ID NO: 18013 - DNA, 376 bp, Glycine max
  unsure at all n locations
agcttgcatgcaaattatcttaatataaaaacatgcanacattgaaccatagaggtaaaagtttcctatgaaggaaactaanaaacactgattaaagaaattgtagataacacaaacaaatggaaaaacacctcatgcacatggattggaaggaacattcattaaaatgaacatacttgcccaagaaatctacagattcaatgcaattcctatcanaatatcaatgtcatttttcatangaatagaanaagcaatcctaanattcatatagaaccaaaaaagagaccanatagcccaagcagtcctaagcaaaaagaacanagctggagtcatcacattacctgactntaaattatgctacaagactatagtaatc

SEQ ID NO: 18014 - DNA, 380 bp, Glycine max
  unsure at all n locations
agctngttattgcaggcactgngccggtttgttttttaacctgttttacctctacatttacactatcagcataatatactataaataaatatatgctgattaatatattttcaatggtacaatttaaactaaatattatttttaaaaccacactctctctagctntgttactaagagcaaagcaagtcacatacagtaaggtttagtcttattgtaaaagaaaaatttcagacaacataaatttaacagaatttacgtggaaaaaaaagaaagattcatgaatcacacattacacagaatctgaaaagattcagagagctctgctttgccacatgggcagtgagtatttatagacagaacatgggagtaagtatagaaat

SEQ ID NO: 18015 - DNA, 255 bp, Glycine max
agtttctttgcccattgcctcaaggacattgttttcacttgtccctagcacgtgcctatccatatttatggatgagtggattatcactagacaaagacaaattatctttaaatctgaagctataaaatgtttatgtttgttgatttatattgcccagctgttctcccagcagggtggttagcagggtgacataaaaataaaacagcatccaccctttctatgccaaatgtaagaaaagaattaaaatgatgttcc

SEQ ID NO: 18016 - DNA, 283 bp, Glycine max
  unsure at all n locations
gaaaaaaaaatagaaatgaaagacagtccgggaaaatctcaaggttttaggtagaattatctgatatgtgtggtatttatattttttcccttataaaatctatanaaaattatactaaaaaataatccattaaaatctgtatgaattttaatgaaagatagttataaaaaatcttaattgaatatcatcaaattttattgatattaaaaaataattctaaatatcttgattgaatactataagatttttttatcttatttaaaagttntgattgaatatcaca

SEQ ID NO: 18017 - DNA, 358 bp, Glycine max
  unsure at all n locations
cctcaagaagaaaggaattcacccagtgcatacaagtatctgcaggcacanataaatccttggctgagctcaagagacttttaaaaggtctaatctgagattccttatgaaaaaaattccagcatagccagttagagaaagagagcctatatggccaataattattcttgctgcactttatgtaaataattaggcatagtataataaagcaagcttattttgcaaataaattggtcttgtctttagtaaaaataaactggagagagacaaattatggttcataacagctacagcacacctgttattagattccaacctcatccattgttcttgagcttctgctgatgaccccatattt

SEQ ID NO: 18018 - DNA, 452 bp, Glycine max
  unsure at all n locations
agcttactatcatggtggaaggtgaagggggagaggacaagtcacatagtgaaagcaagagcaagagaganagtgtggtcggcagaggtgccacacactnttaagtaaccatatctcatgagaactcactatcaganagacaacaccaagccatggatcattcaccccatgatcaaaacacctcccactaggccccaccttcaatgctggggattacaattcaacacgagatttgggtggtgacaaatatccaaactgtatcagcagactaatacaatagtacattatgatcaaatagggtttatctcaagatgtaaatntgggttaaccatttgaaactaatcgtgtaattcaccaaaattacagcatanaaaagaaaaatcatatgagtatctcacaagatgcagaaacaggatttgacaaaattcaatacccattcatgataaataact

SEQ ID NO: 18019 - DNA, 307 bp, Glycine max
  unsure at all n locations
agttnnatttanactccacaccccgcaccctcttctgctctgcttcctgtgggaggaaccttacaaatnccaaatcatgtcagccaacgtatttaaagtactgaaaacatattttangaataaaatctgaagaaaaatgcgtttcctatgcctgngtcacatcagtttgggaaaaaatctgatgcaagaagataaaatgccagctccagtagcagaaaccaactaccacatcaaagtttgtcatctgccttttggttgaaagcatggcangcaagcggatctatagtgcagcccgctgatcatttta

SEQ ID NO: 18020 - DNA, 412 bp, Glycine max
  unsure at all n locations
agctttttgtctttttttatccagangctaatatgaatgattcccaaacttgtgcacattgaaatcaccaacaggtctttcaaaaaatactgatgtgggttgaagacattgtgatttaattgttattgggtatgacttgagcattagtattttaaaaatcttgtagatgatttaattttagccataaatgtatcccatagtttgtttatcccataatttctgattcttcccacatcaagaatcaggtgacatcactgaagattgtacaagtattaagttgataattagacaatataaaaaagcattatttcaatatatttaacattgtaatgaaatggagatttttgaaatataaanattactaaagcttactcatgaagaaataaataacctgaatagccctatatctaat

SEQ ID NO: 18021 - DNA, 235 bp, Glycine max
ctgcaattgacctaattggtgtttttcattcattagctcttcctgaaacaaggatttctgcttctcccatgattgaaacttcatttgggtcttcttttccctccttgagacctcttgacagcttgtggctgactcagccgcttgtaacttagcaacctccatctctttcctcagtgcagcattttccacctcaagtttccggacatcagcattggttctttctacctgtgcactc

SEQ ID NO: 18022 - DNA, 376 bp, Glycine max
  unsure at all n locations
agctnttctaanaaaaaataattaataattaaatctctgaagtggatatattcttcctanatcaatggcacattgtctntgttaactntgttgttgttatttccttttaatagtacgtttgctgtttgaacactcggtctaacttcagttcattcaaaaacagttcattttgaaaggaacaataaggaacaaacgaaatacacacatgatatggattggctgtatccccaccaaatctcaacttgaattctatctaccagaattcccacatattgtgggagggaacccaggggaggtaattgaatcatggnggctgatctttcccatgctattcttctgatagcgaataagtctcacaagatctgatgggtttatc

SEQ ID NO: 18023 - DNA, 422 bp, Glycine max
agcttcttagtttatatgatgcagatggagccatcttctcaattaatattttggcttcagcaggagtcatgtctccaagggctccaccactagcagcatctatcatacttctctccatattactgagtccttcataaaaatattggagaagaagttgttctgaaatctgatggtgggggcaactggcacatagtttcttaaatctctcccgagactcatacaggctctctccactgagttgtctaatacctgagatatccttcctgatggctgtggtcctggaaacaaggaataatatctctaagaatactctcttaaagtcatcccacctcgtgatggaccttggagcaagtaatacaccagtcctttgccactcctctaatgaatgacgaaaaccttcagaaaattggacctcttgacat

SEQ ID NO: 18024 - DNA, 298 bp, Glycine max
  unsure at all n locations
agctncttatctcaagctcatcttgagggagaagctgctccttccatggcttattccttactaccaagactactcagaatgccccgaaatacaaggctaaaaccctatactactggaatgaccaaaatacaaggcccagacgaaggaaatacctattctaatatttacaaagataagcgggctcatacttatcccatgggctcgaaatctaccctaacgctcatgagaaccctagggccttaccttggatctctaacccaatctacgtggtgtctttctcccaatgcccttgcggggt

SEQ ID NO: 18025 - DNA, 409 bp, Glycine max
agcaaggtttttttgtattggcaagaaactatggaatggcagagttgaattaataaagatcaacaaagtatgaactttagttgaagcttcaaaggatataaaaccaattggttgtatatgggtttacaagacaataattggagcttattggaaggttgaaacctacaaaactcgccttattgccaagggatattgtcaaaaggaaggtatagattatgacataacttttgtcccatggcgatactcaaatcaatttggatgcttcttgctatattagcatactatgatcatgaaatatgatatggatgtggaaaatggctttccttaatggtgagctataataacatgtgtgtatgacaaaacttgatggatcacatcctagtcttatcataataaagtctacaagttt

SEQ ID NO: 18026 - DNA, 413 bp, Glycine max
  unsure at all n locations
agcttttgcttttaatatcttatnnngnaatttaacaaaaattgcttccctatcaattagcatctcatccactgctgccactgatgaagatcccattagatattggggaatactgggcggatttctgccaaaggttacttcgaagggtgaaactccaattgttaagtggactgatgtgttgtagaaccatttgacccacataaaanattttccccaagttgcaggtttatggtgaacgaacgcccgcaagtattattcgacaactctgttgatgaccttgatttgtccatctgattgagggtgataggcagaactcatttgcaatttcgttccacgcaatcgaaagagctcttgccaaaacttactcacaaataatgggtctctatcagacacgagacttcgaggcataccat

SEQ ID NO: 18027 - DNA, 413 bp, Glycine max
  unsure at all n locations
ttgcttanactttgtttagcctaccatcctcagactgatggccaaactgaacggaccattcagtcgttggaggaccttttaaaagcatgtgtcttatagtagaagggaagttgggagagttttcttccattgatagagttcacttataataacagttttcactctaccattggcatggctccctatgaagctttgtatggtagaaggtgtaagacacccctatgttggtcaaagcccggagaaggcctcaccttatgaccagaagtggtacaacaaaccactgagaaagttaagttaattcatgataggatgagaacggctcagagtatgcaagaaagttatcatgataagaggaggaaagatttggaattcgaggttggtgatcatgtattcttaagagtcactccgtggac

SEQ ID NO: 18028 - DNA, 409 bp, Glycine max
agctagcatgccttttgaaccctattcaaatggcacaaaccttcaataaggcaaatataaatccccaaatcagccctatacccggagctcaccaaatccttcaacaaatcaaaagccaatccaaccttaccctcagccacaaacgcctcaaccagcgctccatatatcaccctatccaccaaacaacccttccccttcatctccctgaacaactcatacccctcctgaaccctccccccttttgccagccccacaatcatggtagcatatgccttcacatccggcaccacccgggccctcttcatctactcccaaaccctcagacacgcatgcagattacctgcaggcaccagaatcttcaccagcgccgtgtatgcagacacatccagcttacacaacctctccctta

SEQ ID NO: 18029 - DNA, 286 bp, Glycine max
  unsure at all n locations
tcgttaagcaccgtaaataaacttccaagcatcggttgacaanctttcgtctgtacgtcagtttggggatgatatgctgaactgaacttaggttgtgtacctattgctttaaaaatggctttccagaagttgcttacaaacaaacggtcacgatctgaaacaatggaagatggaaatccatgcaatcttacaatatcctgtagaaaaactgcagctacttcggtagcggtgaagggatgtcctaatggtatgaagtgggcatattcagtgagtcgatcaaccacca

SEQ ID NO: 18030 - DNA, 351 bp, Glycine max
  unsure at all n locations
tctgctntgagtttattcaaacgacaataactgtntactcggatgtctgattgagtcccgtaatatatcgagacgctcgaactggaataccgaagctctgagataattcaaacgacaatgacttcttactctgatgtctgattcggtcccgtaatatattgaaacgctcgatattgaaagttgaagctctgagcaacttctaactacaataactctttactcggatgtgtgattcagtccagtaatatatcgagacgctcgatattgaatgttgaagctatgagcagattcaaacgacaataactttttactcggatggctgaatgagacccgtaaatatcaagacgctcg

SEQ ID NO: 18031 - DNA, 398 bp, Glycine max
  unsure at all n locations
agcttccttgttattattcctatataagctagagcttagctacacacacgcctctaatagctaagctcacctccttgagatgagaagctagaacttaactacacacacnccctataatagctaaactcaccccccatgcncaaaaataccatgaaagataacaaaaagaagtccctactacaaaagactactcaaaatggccttgaaatacatggctaanaccctatactactagaatggcctttatacaaggcccanaagaaggaaaaacctattctaatatttacaaagatgagtggactcaaccttgacccatgggctcagaaatctaccttgaggtttatgagaaccctatggccttgtttggtagctctagcccaatcctcttggagtcttct

SEQ ID NO: 18032 - DNA, 428 bp, Glycine max
agctttatctttgtcctcaggcttcatgtagacttgtccaaaatcgcgaagtgaacctcggatccctgtcagatacaatactagaaggaattccatgcaaccttactactttcttgatgtacaactccactagcttctccattctatacttcatattcaccggaataaaatgagcagatttggtgagtcgatctactatgacccacacagcatcatgtccacgactagtcttaggtaaactagatacaaaatccatagatatgctctcccatttccattccgggatttccaatggcttcaattctcccgatggtcgctggtgctcaaccttagccttttgacatgtcaaacatcttgctacatattcagctacatctttcttcatgccatgccaccaaaaacttctcttcaaatcttggtacatctta

SEQ ID NO: 18033 - DNA, 411 bp, Glycine max
  unsure at all n locations
agctttatattctaatatatnnctttacttgagattcacagtgcagatcaattaacattataccaattataattatttagttataagcttttatgtaacatttcacaatttgttctttataaaggattgtgatttttaatacaagttactttaattattcaacgttctacgtaaattatatatagcctctccaagcctaacacaacaatatttgagctcattttgaatttgaaataataacttaagacttattaattgaatgaaattggaattatattttcaattatacaatgatttgattttactattttctggctatgactattagtaaaaataaacttgatattctgatctcttaactggacctaacgttttaagacttctaatactagtaaagcttttcttaaacaa

SEQ ID NO: 18034 - DNA, 319 bp, Glycine max
gaggagcaccaactaatgatgctgatgaggcagcccctgacccagaagacgagtgattcttacaatactgcacactattctcatacatcctttccaacacatagtgccccaaattcccatttgcctccaataaattctcattgcacagaaactcactcgcacaaaccttctccactttcccatagaagtcatgcaagaagacatgagtcttatggttcccaccctttttgctcctggcgagaacaccaacggtgaatatcgctgacattctgccaggagcatctggccagtccccgcgtgtgccgtcaaccaatatgac

SEQ ID NO: 18035 - DNA, 431 bp, Glycine max
agcatggaacttgttttttgaattatgggtcctcttaaggactgagtcaatatatttgttgactgatcattagaaccaatgaacttagtgacaatctccttggacaaaagcttctctcgaataaaatggcaatcaatctctatgtgcttaatcctttcatgaaagactgggtttgaggcaatatgaagagcagcctgattatcacaatacaacttcatttgcaactcttcacaatacctcaattcttgtagaaattgtttaatccacgagttcacaagtaaccatagccatagatcgatatttagcttctgcactggaccaagcgacaagtgtctgtttcttgcttttccaagagataagaattcctccaatgatgacacataagcctgatgtagacctcctatccatgggacagccaggccaatcatcat

SEQ ID NO: 18036 - DNA, 386 bp, Glycine max
  unsure at all n locations
agctttgagtttattaaacgtcactaactntntactcggatgtcgaattgagtcacgtaatatgtccagacgctcgcaatagaataccgaagctctgagcaaattcaatcgacaataaatttttactcggatgtcggattgagtcacgtaatatatcgagaagctcgaaattgaataccgaagctctgagcaaattcaaacgacaataactttttactcggatgtgcgattgagtcctgtaatatgtagagacactcggaattgaataccgaagctatgagcaaattcaatcgacaataactttctactcggatgtcggattgagtcacgtaatatgtcgagacgctctatatagaataccgaagctctgagcacattcaaacgac

SEQ ID NO: 18037 - DNA, 406 bp, Glycine max
  unsure at all n locations
tttaattagatggggtttgttaatgtttatcttaacactatgttgtctaagcttacataatatgtctgaagtttagtacatatgcttgtactacaatttcaagatcctaagatgttgagnttttaattaaaccatgtgtggcaggaaatgaatgttctgagagattggcatactatggtatgagtacaaacctggtgaactatcttctggagcgtttcaaccagggaaatgcaaccgctgcaaataatgtcacaacctggtcaggcacatgctacatcacaccattgatnggagcctttctagctgattcatacttgtgaagatactggacaatctccagtttctcaattgtctattagtattgtagtttagagatnntttttttcttgtttgttgagtccccatg

SEQ ID NO: 18038 - DNA, 395 bp, Glycine max
atcttgagaagacaacgggggaggtgctcttaagagggtatgcttccgaagctatgagattaaccttaagcttgcaggaccaagcttcttatgccatacccagtgatgctctttgatcgagagtaggcacaacacttttttatcttgacaaatcaccaagtgtaatgtcatacagatttccttgtctcttagttgaaaaaagtgaagagttatccttgttatggatgatacacatatccttgttaaaggcgacattgtatccacaatcacataattgacttatgcttagcatattatgcttcaaccctttaagaagcaaaacattatctataggaggataggaaggaatacatactttacctacgccagttatcatacctttctgatccatctga

SEQ ID NO: 18039 - DNA, 416 bp, Glycine max
  unsure at all n locations
agcttttcatcttaccacttccagggtgctggaactacttcacatggatttgatggggcctatgcaagttgaaagccttggaggaaagaggtatgcctatgttgttgtggatgatttctccagatttacctgngtaaactttatcagagagaaatcagaaacctttgaagtattcaaagagttgagtctaagacttcaaagagagaaagactgtgtcatcaagagaatcaggagtgaccatggcagagaatttgaaaacagcaggttcactgaattctgcacatctgaaggcatcactcatgagttctctgcagccattacaccacaacagaatgggatagttgagaggaanaacaggaccttgcaagaggctgctcgggtcatgcttcatgccaaagaacttccctataatctct

SEQ ID NO: 18040 - DNA, 346 bp, Glycine max
attgtgtaccgtagtatatcgagatgctcgtaattgaaaacagaagctctaagcagattcaaacgacaataactattgactcggatgtccgaatgtgtcctgtattatatcgagatgctcgaaattgaaaactgaagctctgagagaaatcatatgacgataactttttactcggatgtccgattgaatcccgtaatatatcgagacactcgtaattgaaaatggaagctctgagcaaattcaaacgacaatagcttttgactcggatgtccgattgagtcccgttatatatcgagacgctcgtaattgaaaacagaagctctgagcaatatcaaacgacaataac

SEQ ID NO: 18041 - DNA, 422 bp, Glycine max
  unsure at all n locations
agctctanatggatcttatttgnnatncaaatggggggttggcttttaacaaaattcttattgcatatttctaagtttattttatttagtaaatatgtgtttattctaaaaataaagatgaattgagagtaaaagatagaattttgatgaatgaaatgattaaaaaattgagacagtgatcacttattgaaaatataattattaaagatttgaattgattaagtgctagatataaactagtcttaaataaaattataattctccatgtaaatgagttgaacaaaattataatctctgtaaatatattttaatgtcaaacctaccaaaatttaaactaaccgctcaataaatgtaaattttaaacttaaattaatttatttaattaaaaaataagtttaactacatatttaataaattaaatt

SEQ ID NO: 18042 - DNA, 431 bp, Glycine max
  unsure at all n locations
agcttgtgnattctccttcttcactacatgaagaatcaccgggttgagtcttctatgtgggtgtcttactagcttagccccatcttctaaatttattcgatgcatacatatggatgggctaataccaggaatgtccgccagggtccaacctatatccttcttatgcttcttgagaatagataatagcttctcttcttgctcatcagcaatggaggcagatataattactggaaaacttttgctatcatccaagtaagcatattttaaatttgatgacagaggcttcaattctggtgtgggcggctggatagtggtagaaagggatggtttctcagcctgtacctcataaagaaagtcagaggtatgtgtacttcctgaaacatggttagttctatctgactctataaaatcaatctcaagaggtaaaacat

SEQ ID NO: 18043 - DNA, 359 bp, Glycine max
  unsure at all n locations
agcttgtangttcttgtttcttcttcatcaatggaggggttggcttctcgaagatcaatgttagcggaatggagaaggaagaaacgtgattggagacaccactccaaggacaagatgagtcaagaacaaactcaccaccataggaagccatggataagagcttacagttaggagaagatgagtgaagggagaaagagagaacgagcacgaaattttatgcctcacatgaggtctgaactttgaagtctaatttcaaatgatcagagttgaataatttcacacacaaggcctctatttatagcttcaatgtcacacaagattggagagaaatatgaatctctattcaaatttcactcgaa

SEQ ID NO: 18044 - DNA, 423 bp, Glycine max
  unsure at all n locations
agcttgtcatttgttcttatagtgacaatttctttacatggagctacatgaacctgctgctcgatctagcacgaggagaactcatttgcagcatacacaatcacttagtattatggtagttntagaaaggagtggccgccactgtggttgcggttgcgcactaattcgaatatgtttagcggaagttaacggtggtggaataagttagtcgaacgttccaattggaaggagcaacattccatgcaataatagtctccctggtggtgtatgaagtgattctgacagaaagagcttggccacccagagttgcaaatgcttgataagaagccccccagttgtggctcatgctaatccatccacttctgcttnctttcacagacatgcttgatatgtctcctccaccttccacgttcttcacgtata

SEQ ID NO: 18045 - DNA, 410 bp, Glycine max
  unsure at all n locations
atctttcttcatcattccaaacttgtcatcattaggcttaggcagcatctccgtaacaaatttatattttataatacatgttacccaacagagaaatagaaggaaaagagaaaaatattagacatacattatgtaatactgttgaaaaaatttcaatcccgattagctaaaaataatgttaaaattaagtatatacaaagtagggtattctttttcctattagtaacttcttgaaattaagttaaataatggtatcacagtctatataagagagggaacaaactcttccttaataaataaatcaaatgtaaactcatattttaataaatatagttttcagacacaatctctattagtaattagaatttattgaaaattataaacatgtgtaatgtttattactntaatct

SEQ ID NO: 18046 - DNA, 382 bp, Glycine max
ggattatcagatgtttgtaatcgattaccagtaacggcacttcagaaaatactttaaaaagtcatgacccttcaaaatataactgtgtaatcgattaccagaaacctgttatcgattaccggtgataaaatttcaaaaatactttttgagagacacatgtcttcaaactattttgaaaaggcacgatgggcctatatatgtgtgtgtgtgtgtgtctgactttaaaaagcaagagagagatattctatgagaactcaattggcaaatgctctctcaacaactcttgggcaaacacttacaaatctattgagaattcttctaagatctttaatgtgtatcatctactctaaaagagagaaatctttctgttcatcttgaactc

SEQ ID NO: 18047 - DNA, 439 bp, Glycine max
  unsure at all n locations
agccttggagttttttagttccaatncgncttcttctttagtccagtcttcttctggcttcaattcttcagtgggctttccttctgtgtccagcatcttgggatgttcccagcctttgatgacagctttccaaggtctgctatccaatgatttgaggaaggccaccattcttgctttccaatattcatagttgcttccatcgagaattggtggtctgttcactggtccgccttctttctccatgttcatcagaaatttatctcctagatctcactctgtgatttcgagtgttggctctgataccaattgatattctgataccagnggacagatgtcgtacatgatgtcacgacatcacgcttcagaacatgcagattatatgtgtccgtatgaacagattaaacaagttaataacacaggagaattgttacccagttcg

SEQ ID NO: 18048 - DNA, 371 bp, Glycine max
  unsure at all n locations
agcttgtgttctattatatataggacatgcatgatgtcctttgacactatatccacttaaattgccatatgctaganagtcattaatagtacaaaacaccattgagtgtaacctgaatgtctcttgcagatgctcatcccacacatcaaccttgtctttccataattttctcaagtcttcaatcaacggagtaagatacacatcaatatcattccctgactgccttggactcgctatcatcatacataggataatgtatnttcacttcatgcacaacgaaggagggaggttgtaaatcatcagcaaaacaggccatgaactgtggtttgtgcttaagtttccaaaatgattcattttgtttgaagcaagag

SEQ ID NO: 18049 - DNA, 373 bp, Glycine max
  unsure at all n locations
acatgcacaaagtgtgactatatgatgtggcaatgtttgtgtattannagcaaatgctcacctctccctctaaanatgtgaattggatagagcttctaccaacttcacattaaatttatttccaaccatacacatcaaatattcacttagtgcgtgtgaaattacaaaactacccctaatacaaaaactagtcttggtgccctaaaatacaaggactgaaaaatcccatatttctagggtaccctacctacattatggagccctaaatacaaagaccaaaattaatgaaaccttaatctaatatgtacaaagataagtgggctcatacttagcccttgggcccgaaatctatcctaaagctcatgagaaccct

SEQ ID NO: 18050 - DNA, 461 bp, Glycine max
  unsure at all n locations
agatactcagctagcatcctgaagacaacttctatgatatatagacttgttgtttatgagtacatggctaatggttcattggataaatggatattcaacaagaacaaagaggaatttcagttggattgggatacaaggtataacatagcacttggaatagcaaaaggacttgcttatctacatgaagattgtgactcaaacattattcattgtgacattaaaccagaaaacgtgctcctagatgataatttcagggttaaggtttctaattttggtttggctaagctcatgaaacgtgaacaaagacatgttttcacaacacttagaggcactagagggtatcttgcacctgagtggatcacaaactgtgccatatcagagaanaatgatgtttatagctatggtatggtgttgctagagatcattggggggaggaaaaactatgatcctagtgaaacttc

SEQ ID NO: 18051 - DNA, 342 bp, Glycine max
agcttctcgatatattatgcacctgaattggacttccgtgtgacaagttatgaccattttaattcttcgagagcattcggtgttcaatttcgagcgtctcgatatattatccatctgaatcggacttccgtgtgataagatatgaccatatgaatttctcgagagcttccgctgttcaatttcaagcttctcgatatattatgcacctgaatcagactctccgttgaaaagttatgaccatttgaatatctcgacagattccgatgttcaatttcgagcgtctcggtatattatgcgtcagaatcggactttcgggtgacgagttcgaccatatgaatttct

SEQ ID NO: 18052 - DNA, 405 bp, Glycine max
  unsure at all n locations
tgcttatagtatatataataaaagaactatgactattgaagaatctattcatgtttcctttgataagtctaatgctatttctctgagaaaggatattttagatgatgttgcataatctttagattaaatgcatattcatagacaagattctaaaggaaaagggaaaggaagcaatgaagatcctccagaagaagccaaatcaaatgatgaacttccaaaagaatggaaagcttcaaaagatcatccccttgacaacattattggtgatatctcanaagggataacaactagacattctcttaaagatntatgcaataatatggattntgtgtctatgattgaacctaaaaatataaatgaagccataatagatgatcattggataattgctatgcaagaagaact

SEQ ID NO: 18053 - DNA, 302 bp, Glycine max
  unsure at all n locations
agaatgtgcttagagcttctattctcaatacgagcgtctcgctatattacgggtctccatcggacatccgtggaaaagattattgacgcttgaatttgcaacgagcttacaatttcaatgtcgagcgtctcgatatattacgggactcaatcggacatccgagtaaaaaattattgtcgtctgatttgctacgagcttccgttttcatttggagcgcctcaatatattacgggactctattggacattcgagtaanaagttattggccgttgaatatgctcagaagctcattctcaatttcg

SEQ ID NO: 18054 - DNA, 430 bp, Glycine max
  unsure at all n locations
caagcttggagtttcctagtgccaattcgtcttcttctttagtccagtcttcttctggcttcaattcttcagtgggctttccttctgtgtccagcatcttgggatgttcccagcctttgatgacagctttccaggttctgctatccagtgatttgaggaaggccaccattcttgctttccaatattcatagntgcttccattcgagaatggtggtctgttcactggtccgccttctttctccatgttcatcagaatntatctccctagatctcactctgtgatttcgagtgttggctctgataccaattgaaattctgataccaagggacagatgtcgtaccggatgtcacgacatcacgcttcagaacatgcagattgtatgtgtccgtntgaaccagtataacaagtaaataacacaagagaattggt

SEQ ID NO: 18055 - DNA, 319 bp, Glycine max
taagtcaatatcttttatctgtcttattcatgcacatgcctatattctgatcaatgaatcatcttaggtactataacataactattctgtatacggctctttgtattgctaatgctatatatgctacatcatattttgataaataaatacttttaggtagtataagatcatagtttgaatcgtaatgttatatggacattagatttacgttatatgataaattacgaatacttttacatactctaaggtttaattttatatggtacattaagaatatctttaattttgatatgatacataagcctacttgaaatttcct

SEQ ID NO: 18056 - DNA, 342 bp, Glycine max
agcttcaacattgtatttcgagcgtctcgatatattacgggcctcaatcagacatccgagtaaaaagttattgttgtttgaatttgctcagagcttcaacattcaattccgagcgtctcgatatatgacgggactcaatcagacatccgagtaaaaagtcgttgtcgtttgaattggctcagagcttcaacattcaatttcgagcgtctcgatatgtgacgagagtcaatcagacatccaagtaaaaagttattgtcgtttgaatgggctcagagcttcaacattcaatttcgagcatctcgatatgtgacggggctgaatcagacattcgagtaaaaagtt

SEQ ID NO: 18057 - DNA, 428 bp, Glycine max
  unsure at all n locations
gagccaattcanatgacaatgactntntactcggatgtctgattgatgcccgtaatatatcgagacgctcgaaattgaatgtggaagctctgagccatttcaaacgacaataactttttactcggatgtctaattgacgcccgtaatatatcgacacgctcgaaattgaatgttgaagctctgaggaaattcaaacgacaataactttttactcggatgtctgattgagtcctgtcatatatcgagacgcttgaaattgaatgtggaagctctgagccaattcaaacgacaataactttttactcgaatgtctgattgagtcctgtaatataacgagacgctcgaaattgaatgttgaacctctgagcaaattcaaacgaacaataacttttactcggatgtttgattgagactcataatatatcgag

SEQ ID NO: 18058 - DNA, 430 bp, Glycine max
  unsure at all n locations
naagctacatatttgtctgttggaagaaagccatggatgctgagagtacagctcttgaagtaaataaaacttggactgctgaggatcttccatgtggaaaggttccaattagttgcaaatgggtatataaaatcaagtatcatgccaatggcacaaatagaaatgtacaacgccaggcttgtggccaaaggttacactcagatggagggtgtatactactttgacactttttcccctatagccaagatgactacagttcgtgtgttactaactgtcgctgctgataagagtcggcatcttgacaacttgatgtcacaatgctgtcttgcatggaacttgaatatgaagttatatgctcttctcctggtatgatcttctactcttcagtatcgaattaacattccttattgggtgaccaactaccgtcatg

SEQ ID NO: 18059 - DNA, 317 bp, Glycine max
  unsure at all n locations
agcttttaatgatctttgtcatgcagccgatgagagaaataggcctgtagtcatttaacgattgaggatgatttgatttanggatcagggccatgaacgaagcattgctgcctctatgaaagcttccatggcagtggaactcatccacaaatctcctgaatttacgtctcagaatcttccaaaaagccttaataaagttgaaattaataccatcgggacctcggcatctatcaccaccacaactccaaacagcatctttaatctctcgatcagataaaggcgcaatgagtccctctctctgattctgatcaatggag

SEQ ID NO: 18060 - DNA, 282 bp, Glycine max
agcttttgattaatttatatggtcataaatagtcactcggaggtccgattcatgcacataatttatcgagacgctctaaattgaacaacggaagctctcagaaaatttaaatgctcataacttttaactcggaggtccgattcacgcggatgatatatcgagacgctccaatttgaacaatggaagcttttgaacaattcaaatggtcatatattgtcactcggaggcccgaaactagcgcataatatctcgagacgctcaaagagaacaaacggaagctct

SEQ ID NO: 18061 - DNA, 427 bp, Glycine max
  unsure at all n locations
tcgtgaccagcgatgtttcggttatgtgcacgaaggagagatagaagacagtgaatggngatgacattnggtgggccttggcaacactaagctttgatgactatgctgaaccaatgagaaggtacttgcatagatataaagaggttgaggtagaccataataataaggtcaatcttcaagatagagagaataatagtcctgaagagaacgacgatgaagtatttcaattgagtaatagaggggttaaggtttgatgaccaattattatgcttagtgtgaagtagtaattaattaaggcttgtttanggttgacattacttttcttgtatacttttcttgtctaaattgaattgattgagcctgcctagaacaagaattcttggtttgctttctttctttctcttcttcttctntatacttatatact

SEQ ID NO: 18062 - DNA, 299 bp, Glycine max
  unsure at all n locations
gaagatgatgaatgggaaacacgggggccgaacaataaatctgctgttaccaagactcaaagctttcttccatcagaattaagtggtatttttggaggacaacttagaagtttggtgagagcctaaggtacaaaacaactctataatatattagtgaagggattctttttgttttaaatgtcaacttcattaagatnttgggaaaattcaattggaccagctgttgcttcctgctgatattccttcaaagaaaaaatgaacatgtacataaatgatgtattatataaaacaaacattat

SEQ ID NO: 18063 - DNA, 298 bp, Glycine max
  unsure at all n locations
agcttcttgattgntatgtgtggaccctcaagtgcaatcctccgttctccacttatttcggaaccccatgaatgtcattgcctagcgctattcatgtgtcctccaccttcgagtctggagccccacgaatgtcattgcctagcactgttcgctaattctccattcttcacttttattcggagccccatgaatgtcattgcctagcgctgttcatgtgtcctccaccttcaagtttggagctatgcttcattattgcctaagtgtggaccctctagtgcaatcctccattcttcacttt

SEQ ID NO: 18064 - DNA, 440 bp, Glycine max
  unsure at all n locations
tgatcttgtaggccactgcccctgatgtcagctccattggttcttgtttacctaggatcttctccatcaatggattcctttgctttttggaagatgaatgacaacgtaatggagaagcaagagagagaggagacgccacttcaaggaaaagtgagtctagaagaagctcaccaccataagaggccatggataagagcttagaggaagaaggagatgaatgaagggagaggaagagaagagcacgaaattttgtgctctaaaagagctctgaaatctgaagtttaatattcaaatgatcaaagttgaaaaaaatgcacacacatgacctctatttatagcctaagtgtcacacaaaattggagggaaatttgatntcaattcaaattcacttgaatttgaattgaantgtggagccaactttggaccaaatttactaatat

SEQ ID NO: 18065 - DNA, 333 bp, Glycine max
  unsure at all n locations
agcttttactttttatntcgagctttncgatatatgacgggactcaatcggacatccgagtaacaagttattgtagtttgaattagctcacggcttcggtattccatttcgagcgtctcgatatattactggactcaatcggacatcagagtaaaaagttattggcgtttgaatttgctcagagcttcgagattccatttcgagcatctcgatatatgacgggactcaatcagacatccgagtnaaaagttaatgtagttcaaatttgctcagggcttcggaattccattccagagcgtctcgatgtcttacgggactcaatcagacatccga

SEQ ID NO: 18066 - DNA, 281 bp, Glycine max
ttgagcaaatgcacacgacaataactctttactatgatgtttgattgagtcctgcaatatatcgggacgctcgaaatggaataccgaagctctgaacaaatttaagcgacgataaccgttttactcggatgtctgattgggacccgtaatatatcaagatgctagaaatcgaatagggaagcgttgatcaaattcaaacagacaaggactttttactcggatgtgcaattgagactcgcaaatattcgagacgctcgaaatggaatattgaacctctgagc

SEQ ID NO: 18067 - DNA, 442 bp, Glycine max
  unsure at all n locations
ttcttatgcttatttcagcctatcgcccttagactaatggctagattgaacggaccattcagtcgctggaggaccgtttgagggcatgtgtcttagaacaaaagaggagttgggagagttaaagactactcaaagtaggcagaaaaactatcaggctgctcaagaataactgagaaggtcaagttaatccaagaaaggctaaagactgctcaaagtaggcagaatagctatcaggacaagaggaggaaagacctgaaatttgagattggtgatcatgtattcttgagagtcattccattgattgggttggtcaaacattgaaatcccaaanactcatacctcagtttatcaacccttttcanattctcaaatgagtcagtcctacggcataccaaaatgcattacctctgtctctttacaatcttgacaatatctatcatgt

SEQ ID NO: 18068 - DNA, 319 bp, Glycine max
ttattttatatccaatatatcctctaaattattatattaaaaatttatatattattaatcaaagagatttgaacattaatcaaataagttaatttaaaatatagaattgtctttaatggaataaataagaacaaaattgatttaaacgaaaaacttatctcaaatacgtgaatgttattattgaaactttaaatattatttaatatttgaaaataattttatcaattaatggttaaacatgattcgagaatgtaatatgtacttattatacttcattcttataagtggtgattacatgatttaaaatatgaggttatcc

SEQ ID NO: 18069 - DNA, 289 bp, Glycine max
tgtagggttaaagtcttacgattttcacgtgctcatgcaactattgtgagccggggctatatgagacatggtgccaaacaaagtcaggttaacgataactcgcctgtgctttttcttccatgctatatgtagcaaagtcattgatctagtcatgtttgatgagttggaaaatgaggccgcaattatactgtgccagacggagatgtagtctccccctgcgttctatgacatcatgattcacttgattgcgcatctggacagagaatcacatgttgtggtcctgtttatc

SEQ ID NO: 18070 - DNA, 373 bp, Glycine max
tgcattcatgaacctaacaaacaatacttatgcatatcttcagtcctgctccaatgaataaatcgttataagtaaaacatgtatgtttattctaactcaccccatcttggagcttgtcctctacagcagtggcaccaaaaagaattaggttcttctcaatcttatctgatacttcctcaatcattatatcctgatcagcactgactacattcttggccctagagaatttactatcaaactccttgtattcttctgcatcaagttcacgataggccagtataaaggttctcagacccgcatcagcatactcatgcacatgctccatggttttctcttcaaactccctcctattcttggcaagcctttcaaacat

SEQ ID NO: 18071 - DNA, 420 bp, Glycine max
  unsure at all n locations
ttctntactatgcaaggaataaccaaggaaaattccttcatctgacttagcatcaaactttcctaagttttcttttccattgtttaatacaaaacactcgcaaccaaaaacatgaagatgcgagatgtttggtttcctaacattgaacagttcatatggagttttctttaaaatgggtcttattaaagccctattcatgatatagcatgcagtattaacggcttcagcccaaaaatattntggaagaagagtatcatttaataaagttctagcaatntctttcaaagaactatntttcctttcaacaactccattntgttgaggggttctaggtgcagaaaagttatgttcagtgtcatgcttatcacanaataaatcaaattatttattttcaaaatcaccccatgatcanctctaata

SEQ ID NO: 18072 - DNA, 347 bp, Glycine max
  unsure at all n locations
tctttacttgtatgccgancaagcgctaatatatggagaccttgatattgaataacacaactctcgagaaattcaatggcataacttttcacacggatgtccgattctggcgcataatatgtcgagacgctcgaaattgaacaacggaagctctcgagacattctaatggtcataacttttcactcggaggatccgatcaggcgcataatatatcgagacgctcgaaattgacgaacggaagctcccgagaaattcaaatggtcataactgttaactcagaggtccgattcaagcgcataatatatcgagacgctcgatattgacatctgatgctctctagaaattc

SEQ ID NO: 18073 - DNA, 370 bp, Glycine max
cccaccatattttcatagtataacactggtaatgtgtctattattattgtgatcatctctttctcctcatggaacgtaccacttgagctgccaagtctctccacctttgggcgtattctttgaaagataagtgcccctttatgcacatgttctataagtgcatactatccggagccatattaaaattatgctgatactgcctaacataggaaaccattagatccttccatgaatggactcaggaaggatccaagttagtgtaccatgtaacaactaccccagtaatactttcttggaagatatgtatcaatagatcctcatctttttcgtatgcccgcgtctttcgacaatacatctttagatggttctt

SEQ ID NO: 18074 - DNA, 457 bp, Glycine max
  unsure at all n locations
taagctntgagcatattctaacgacaataactgtataatcggatgtccttattttgtccctgattatatcaaactgctccaaattgaagatggaagctcagtacaaatttaaacgagaataactttttactcaaatgtgcgattgagtcacgtaatatatcgagacgctctatattgaaaacggatgctcatatcatatgtgaaccgtgataacttttaactcggatgagcgattgagtcctgcgatatattgagacgctcaatattgaacacagaggctctgcgcagatgctaacaacaatatctttttactcagatgtccgattgagtacttgaatatgttgagacgctcgaaatagaaaacaaacgctcctagaaaattcaaacgaataacgttttactcacatgttcgactgattcccgtatatatcagacgctctaaattgaaacgaagctc

SEQ ID NO: 18075 - DNA, 427 bp, Glycine max
  unsure at all n locations
agcttatcttcactttgtacatgcagcctatcaaggatattggtctataatcatttanggactgaggatggttaactttggggataagagccaagacagaggcattgctgcctctatggaaacaaccgttgacatggaactcatccacaaatcttctgaactctggttttagcacactccagaattccttaataaaattgaaattaaaaccgtccggcccatggcacttatcttcaccacaactccacactgcttgcttaagctcctggtctgagaaaggtaaaattaaaccctccctctgcctttgatcaagagaatggaattgaactccatcaatggtaggcctacagggattctgctcaaataatctgttgagaaagatagtcacagcgcctatcttcacctcctctggttgctggacccacag

SEQ ID NO: 18076 - DNA, 391 bp, Glycine max
agcttatatgatattcaaatggtcataacttttgactcggatgttcgattcaagcgcataatatatcaagacgctcgaaattgaacaacggaagcattaaagaaatccatatggtcataacttttcacacggaggtcagattcatgcgcataatatatagagacgctaataattgaacaacggaagccttcgtgatatgcaaattggcataacttttaactcggatgtcagattcaggcgcataatatatcgagacgctcgaaattgaacaacggaagctctctagaaatataaatggtcatatctattaactcggatgtgtgattcaggcgcataatctatagagacctctaaattaacaatggagctcttggcaatcaaatgtcataac

SEQ ID NO: 18077 - DNA, 339 bp, Glycine max
aataactttaactcagaagctttatcaaatgcaaacggcaataacattttactcgaatgttctatttagtcacgtaatgcatcaaaatgctcgaaattgataacagaagctcggtgcgaattcaaacgacaattagtttttactcggatgtccgaatgagtcccttcatatatcgagacgctcgaaattgaagacagaagctagtactaaattccaacgacaatcatattttactcagatgtccgatggagtactctaatatatctagactcttgagattgtcaccgaagctctgagcaaattcatacgaacaatactgtattttcgaatgtccaatgg

SEQ ID NO: 18078 - DNA, 363 bp, Glycine max
atcttctatactttatacaagaatgaagctctgataccacttgttagacaagtggcctcagatatattaagaagggggggttgaattaagatatcccaaactattttcccaattaaaaaattatttcactttcttttcaagttatagattcccttaacaatgaacttcttaaatattaattcaaatcaaacaatttgaatatgaatgtaaagcgataataaacaaaggagattaagggaagagaaagtgcaaactcagatttatactggttcggccacacccttgtgcctacgtccagtccccaagcaacccgctggagagttccactatcttgtaaattccttttacaagttctaaacacac

SEQ ID NO: 18079 - DNA, 387 bp, Glycine max
tctgtcttagtctgagttcagcctaccatcctcagactgatggccaaactgaacggaccattcagtcgttggaggaccttttaaaagcatgtgtcttagagtagaagggaagttgggagagttttcttccattgatagagttcacttataataacagttatcactctaccattggcatggctccctatgaagctttgtatggtagaaggtgtaggacacccctatgttggtcaaagcccggagaatgcctcaccttatgaccagaagtggtacaacaaaccactgagaaagttaagttaattcacgaaaggatgagaacggctcagagtacgcaggatagttatcatgataagaggaggaatgatttggaatcgaagttggtgatca

SEQ ID NO: 18080 - DNA, 328 bp, Glycine max
  unsure at all n locations
agccagtctangttcatacactgatccgttcaatnggcataccgaggaagaattatctgacttgtaacctttgggaaattccatataaacttcttcaaacaaatctccattctaaaaggcattattaacatctaattggagaatgcaccaatttctagtagcatcaacacaaagtaaaactctcacagttgtaagcttggccactggagaaaaagtgatgtatctccatgtggaacttgtaagccttgaatcttctttatcaatggagtcctttacttcttgaatatcaatggccgcggaatggagaacgaagaaagatgattggaga

SEQ ID NO: 18081 - DNA, 466 bp, Glycine max
  unsure at all n locations
actaagcttattaaagttatatggcttgaaacaagcaccgaggcagcgtcactatatgtntaatgagtntatgagcaagtcaggattcaacagatgtgacatggaccattgttgctacgttaagatatatactaatagctatgttatccttgtcgtgtatgttgatgacatgttgatcgcaggatctagtatggcagaaattaacaggttgaagcaacagttggcagaaaacttttggtatgagaattcttagaaacatatcagaaggaattatgaagctgcctcatgagaaatatatacacaagttacttgacaggttataccttgaagattctaagactangaatacccctttgggatctcattttgaagtttcaaagaagcaatctttgtagacagatgaagaaaaatgctacatggtaagagtaccatatgcatcatcagtcgacagtttgatgtccgttat

SEQ ID NO: 18082 - DNA, 425 bp, Glycine max
  unsure at all n locations
gttggaacaaacaggttgtatnacaaatttgtatcttatatgtatatcatnngnggaaattaaaacaacatcaatttcagccccatttacatgtttcgatccatcgaaatataatatccaaggtttaattcatatatagcattccaatattttgatgttcgaatgatcaaccaagagatctacctataacttaggctctaatagcttttaatggcacaaaagtaagggaaaatccagataatgcaagggtccatttccctattctattgtgcaaaatagattaagacaacatanatttaataacattgttatgagagagtacttgaacattgaaagattctatataatacttnaagttagtacaagaataatacaagtgtaagcacagttnntttattgcactatatctaatnttgacatcatta

SEQ ID NO: 18083 - DNA, 414 bp, Glycine max
ctgtagtctttggacacctcagagaccttgaagtttctgttgtggtatccagtgaagacattttcacggtgtgaccatgctgtgccaggatggtatgctatgaatgcatcagtgacatcctggccagcacggtctgagattggaacatcaccaccagggtgctccttgacccaatctgagacattgtacaccttacctcgaattgagatccataaatctccctccttggtgtgacccttcagctcctctgaggttatgtacttcttctccttctcaacaacctccattgcttgtgttaaccaaaaacaacacaaatcactgaaatcatacacaatgagaactacaataagaagatatatagaatatagacagattgatcgatacgaacaataatggcgtatctgggtcttctgc

SEQ ID NO: 18084 - DNA, 337 bp, Glycine max
atctatttctcttgaacaaatacccctcagccgaatagaatccatcttaggccttcttcctacaactctcgtaaatgggagagaaatgttcatctatagcatacaagtccctaatgtcatcaaatcctataattagagctcctacagagcaataaaatgtgtgtctcttagagagggcatcaactaccacatatcgtttcccctttttgtatttgataacatatggaaattgctttaagtactctacccattttgcatgccttttgtttaacttgctttgccctctaatgtacttaagtgattgatgatcactatgaatgacaaattccttggaaac

SEQ ID NO: 18085 - DNA, 386 bp, Glycine max
tttatcttatttctcaattggtgacccaagagaacattttttttatctaaccacccatctattggtgagattaaaaatgtagttttcattatgagtagctctagttcccctatccctgatggtttcagaggccacttctaccacaggtactaggaaattatctcaaaggttgtctataattctgtccttcaactttattcataagaattggcttctccttggatttaaatcaaacattttttgcctttattcctaaatttccataagacgatagaatagaaaacttcagacccactgctctgggtaattcccaatctaagattatctctaaaatcgtcacaagtagattggcctaaattactcctaagctgatgtttaataaccaa

SEQ ID NO: 18086 - DNA, 419 bp, Glycine max
agcttcttttatttaagatttttctttaaaacagtcctaagcagtgtgcctaaagtcctattgactacctcagtttgaccatcagtttgtgggtgacaagtagtagaaaacaacaatttagtaccaatcttaccccacaaggtcctccaaaagtgactaatgaattttgcatccctatcactgacaatgctcctcggtaatccatgaagccgcactatttctttgaaaaacaaatcagccacatgacaagcgtcatccactttcttgcaagggatgaagtgtgccatcttatataacctgtcaacaacaacaaacacagaatcctttccattcttggttttgggcagccccaaaacaaagtccatagatatgtcagtccaaggatattcaggaacaggcaaaggagtatacaatccatg

SEQ ID NO: 18087 - DNA, 449 bp, Glycine max
atagaatactaagcttcaagaataatggcctcagcatacttcttattcccatattgttattcaattattaggcctcctatttttaatggagaaggttaccactactggaaaacccgaatgcaaatttttattgaggcaatagacttaaacatttgggaagccatagaagttagaccttatgtacccaccatggtggctggaaatacaacaatagagaaacctatacaagagtggtatgaagatgaaagaagattattgcagtaccaattataggctaaaaacatcattacttctgccctaggaatggatggatattttagggtttcaaattgtaagagtgctaagaatatgtgggacactctacaagttacacatgaaggaacaactgatgtcaaacgatctaggataaatactttaactcatgagtatgaactattatgatgagaaca

SEQ ID NO: 18088 - DNA, 395 bp, Glycine max
agcttagtctctttacatattgtgaacaagacatctaaggctctggtaatcgattactaggcagtgtaatcgattaccataagacaattttgaaaaatagctgtctaacaggattatgaatttgaattatgaccctgtaatcaattgatgtttgttatcgattaccagcaacagaactcttgaaattcaaattcaaaagtcatgacccttcataatataaccgtgttatcgattaccagaaacctgtaatcgattactagtgaaataatcagaacaagctttatgaatagacacatctcttctaaccatcttgaaaaggcacaaagggcctatatgtatgtgtgtctggtttcataaagcaagagagagatattccaagagaacttcattgtcaa

SEQ ID NO: 18089 - DNA, 447 bp, Glycine max
aagcttacatacattatcttcaaagatcggaattcaactaatttcctccgatgcttctaactctgaaaatatctatgtttgacactaaggataaagttatatactaataatgataatatgtgtctcttttatctccaacaagttatccaaataaataattccttttgtttggaaggaagattgatagatacaaaatgttaacatataataccatgtcataagaaaaaagagatggattacaataatcaacattctttttcaagtgtttgtcttagaataatgatattcatcatattcactctctggatacaataatttttatctcatatttactctctttaatgttctctatctcttttaccacataacatattatatctataaattttgttctttattatatttatttctctctatccctatctttcatccaccattgaccctaat

SEQ ID NO: 18090 - DNA, 420 bp, Glycine max
agctttgcttattattaagatgataaaaaatttcgatgagggtggaaaagttcaaagcaagatacaatggcacattcagtgactgaggcagagtatatagcgacaagttaagccgctgaagaagttgattggatgaacagttcatctctgaacttggtgagctaccttcaataggaggaccgattccactattgtgtgacaatatggagctatcgtttaagcaaataaccaagattacaccataagaccaaacatattttatgaacgtatcacttgattagagagatcattgaacgtggggacatttagattgaaaaggtggatataaaagagaatgcaacatatccattcaccaaggcactttgcataaaagaatttatcaagcacaaggtggaagttatgatgaagtcatgagtaatt

SEQ ID NO: 18091 - DNA, 366 bp, Glycine max
  unsure at all n locations
agcttgtgttctatgtctcaaaacccacattagaagtaagacttataccatattcacccgacaactcaattttgtagacattatcattgttcttgaccagtacttgaaaaggaccatctccttttggcataagtcttgtgaagggaaccgtttctttcctaaaatgcacccatacctagtcacctggttcaaatgttactttttttcttactttgtgttcatactatcgatacacttctatttttnttctctcaatttgggcattgactttctcatgcaacttcttgacatatgctgctttaaccttgccagacttatctttaaatcgagaaatgttacgtaaagaccacaaatacaaaggagtca

SEQ ID NO: 18092 - DNA, 436 bp, Glycine max
  unsure at all n locations
tatcctaaaaaaacaggacatccttactttatatattcagtttacaaaacagaaaaaataacanaataaactgtcatatggattntagtcacagcccaacgattcactaccttgaactaacatccatataagacacaaactgcaccctctgaacacacatgatcttaaccctaacaatctacattgagcaagcttaagcagtgatcaaacttgctctttggaactggctttgtaaacatattagcaggattgtgcagagtgataatcttatgaactttgattcttctttctgaccgaatgaagtgatatctaacatctatatgcttggttctatcatgatgaacctaatccttggccaagcatatagcactaaggctgtcacagtagatgttagcatattcttgattaatttcgagatcatctatcagacctctca

SEQ ID NO: 18093 - DNA, 429 bp, Glycine max
taagaggaccctcggtgtggtagccgtaaacctcatatgccttattcaaaaggtgcttgaagagagggtgacaaagatacgaaattgggatcacaaatctttgagacccaactccaccagcttcttctgtctcttcttccacttgaacagcgagccaacccttcttcaccttcatcttctttcttgcctactgagagatagagcaaagcaaaggaaccgtattattatagctgctgagtcacaatggtaggtaatgtggtttctttcttttatatagaaaagatatatatatatatattaaatggggttataaatttgtaataaaaataaataaaagggataataacttgatgctgtgtgtgttgtgtacgtgattcggaatcaaaatagtggggaaggcaagggacagtgccgtcccattccgtaact

SEQ ID NO: 18094 - DNA, 436 bp, Glycine max
tgtgattcttctcgccctgtataagaggttagctttcgtttcaattaatttatcattcacgtgatcaagatgttagaattaatgtcttatgtgagagacatgtgggactaataaataaataattaataattaaggactaaattgtaattgggttaattatgagaagtggttataaaaggggttaatatccactaacgtgaaataaagttcttttcctgacagaaaaatgttctctctcaccatagttatcacgaacggagagaggcaaaaaagaaaggtctaaggaagtgaaatcttatttatctcatctttcaaggaaatctaagtacatcggagaaaagtcttcctatgaagaaaggtacacattattatctatttgtttattgattatttgtgagaatcataggtttcaagatcttgttatttcctataatta

SEQ ID NO: 18095 - DNA, 426 bp, Glycine max
tttgacggactataccaagctctatgtaacttgggtctgagaaagatctatatataggcttgctaagggtagagagaggaagactagagatttggatcaagtaaagtgtgttaaggatgaagaaggcaaagtcttagtgcatgaaaaagatatcaaggaaaggtggaaggcgtatttccacaacttatttaatgatggatatggatatgactctagcagtctagacacatgagaagaggaccggaactataagtactatcgtcggattcagaaacaggaagtaaaggaagcgttgaaaagaatgagtaatggtaaggcggtggggccagacaacatacctattgaagtgtggaaaactcttggagatagaggtcttgagtggctcaccgaactctttaacgaaattatgaggtcaaaacgcatgcc

SEQ ID NO: 18096 - DNA, 380 bp, Glycine max
tggatacgggtctgtgagtaatcgcttagctcacataatgatacgcaacctattcgtaatactggggttcatattagactgaaaaataagggatgacacacaaaggacagcattgacagctgctcacactgattcatttacaatgaggatgaagtatctgttttgttcgacgaaagtatttagaacttcataaaaaatgccttttgaaaataagtagcatgcacctttcaaatcaacttgaaatcagaacaagtcacacaaatgggagcttttacctcaagaaatttgaagtcaggtttaatggtacaacagatgccttcttgtgtcaataaagaacgaattacaagtgaaaacctttctgggattcgaatgggataatc

SEQ ID NO: 18097 - DNA, 433 bp, Glycine max
tcctttctatacccgcttcagcaaatgtcattttatttcccttcaccacccaatagacatgatgctcaatctccattggaagatgacatgccttaccaaaaaccaccttatagggagacatccccaaaggtgttcggtaagcggtcatgtgggctcatagagcatcctcatgtagcttgctccaatccttcctattgggttgcattaccttctacaacacttgcttgatctctttattaaaaacctttgattgcccattagttcaaggataataagctgtagcaactctatccacaacctcatacttctggagcaaggatgccaatgacctgttacagaagtggctcccctggtcactgataatggctctagacacaccaaacctactaaaaatgttagatctcacaaaatccacaacaagtttagaatcatt

SEQ ID NO: 18098 - DNA, 390 bp, Glycine max
gcttgaggtccctatgcatgaccccaagcgagtgacacgcttcaacaacctcaacaatcgtctttatcaacctcgccgcctgtctctcgctgtagtgtcccttctgcacgatcctgtcaaacaactccccaccctcacacaactccatgacgaggtgcaccgccgaggaatcctcgtacgtcccttcgatgcggacaacgtgcgcgtgctccgacaagtggtgcattatctgaatctcccgccacacgtcctcgtagtcctccttgcacagcagcttccgcttgggaattgacttgcacgcgaatttccccccggacgcgcggcgcgtgcactcgaaggtagtcccgaattgaccctgccccaacttccgccccacctcgtacacctcac

SEQ ID NO: 18099 - DNA, 430 bp, Glycine max
tctaaactttatacaagaatgaagctctgttaccatttgttggacaagtggcctcagatatcttaagaagggggggttgaattaagatattacaaattatttccccaattaaaaattctatttaactttctattcaagttataaattcccttaataatgaatttcttaaatattgattcaaatagaaaaatttgaatatgaatataagacaataataaataaaggagtttaagggaagagaaagtgcaaactcagatttatactggttcggccacacccttgtgcctacgtccagtccccaagcaacccgcttgagagttccactatcttgtaaattccttttacaagttctaaacacacaaggacaatctttcctttgtgtttagaattctttcacaacaagagaccctcggtctcttaatcccttttc

SEQ ID NO: 18100 - DNA, 376 bp, Glycine max
tactcaagctttgcataccccaaggatccattaggaaattacttgttaattatagtctgagggtgggctcatgggccactttgggatagacaagacccttgccttactcaaagaaaagctttattggccccatatgaagaaagatgtccataagcagtgcactaggcgtgtggcttgtttacaagccaagtctagggtgatgtctcatgggctatacacacccttacccatcccatctgcaccttgggtagacattattatggactttgtccttgggcttcctagaacccacagaggtgtaaactctatctttgtggtggcggataggtctagcaagatggcacactctataccatgccacgaggtggatgatgct

SEQ ID NO: 18101 - DNA, 431 bp, Glycine max
  unsure at all n locations
tcacaaaagtttatatggcttgaaacaagttccgttttagtggtacaagaagtttaatgagttaatgagcaactcgggattcaaaagatgtgacatggaccattgctgctatgttaagaaatatactaatagttatgttatctttgtcgtgtatgttgatgacatgttgattgtaggatctagtatggcagaaattaacaagttgaagcagcagttggcagaaaactttgaaatgaaggatcttggtccagctaaacaaatccttggtatgagaattcttagaaacagatcagaaggaatcttgaagctgtctcaggagaaatatatacacaaatggcttgacaggttttaccttggagattctaagaccaggaatacccctttgggatctcattngatgttttcaaagaagcaatctttgcatacagatg

SEQ ID NO: 18102 - DNA, 422 bp, Glycine max
  unsure at all n locations
ntgaaaaatacctgtgcttccgtaaactttatttttttatgtgatgcaagcccagccaaatcatgctccatgtattcgaaaacaaggtataagctgcaagacatccttgatgtaacaaggccttccagttttatgacatttggatgatcaagcctacgtagaatgtgaatttcccttgccatgaagcgaacactctctggctcaagattatcaaacctgacttttttcaaagcaacaattttattttgctcaagatcacgagccctataaacattactataagttccctgtccaatctgaaaaataaggaggaaaatcttaccattcaaggaaaactaaaacaggctgaagacaatatcatcatttaattgcaatccaagacaaaaaaaaacaaaaaggatatctataaatctagaaactac

SEQ ID NO: 18103 - DNA, 426 bp, Glycine max
  unsure at all n locations
ntgacaagacagtacacactgctgtcttctacaacattataaaatatggaaatctactctaaagatacatctaataatacccataattataacactccccctcaagctggagcatataaattatatgcaccaagcttggaacatataaactgaattctaggcccccttaaggatttagtcaaaatatctgctggctgatcattggaattaatgaattcagtgacaatctctttagacagtagcttctcccgaataaagtgacagtcaatctctgtgtgcttggttctctcatggaagactggatttgaagcaatatgaagagcagcctgattatcacaatacagcttcatttgcatcactttgcagaatttcaactcttcaagaatttgtttgacccacataagttcacatgtaactacagccata

SEQ ID NO: 18104 - DNA, 421 bp, Glycine max
tgtagggttaaagtctcacgattgtcacatgctcatgcaactattgttagccgtggctatacgacacatcttgccaaacaaagttaggttcacgataactcgcctgtgctttttcttctatgctatatgtagcaaagtgattgatatagtaatgtttgatgagttggaaaatgaggccgcaattatattgtgccagttggagatgtattttccccctgctttctttgacatcatgattcacttgattgtgcatctggtcagagaaatcaaatgctgtggtcctgtttatctatggtggatgtacccggttgagcgatacatgaagatcttaaaagggtatacaaagaatctatatcgtccagaagcatctattgttgagaggtacattgcagaagaaagccattgaatttgttcagaatac

SEQ ID NO: 18105 - DNA, 421 bp, Glycine max
tggatttacttttagtagggaatctatctttcctatgatggagaaaagaagttttgttcctagcttagcccataaggttttccagaagtggctaaggaacttagcatctctatctgacacaatggtcctaggcaaaccatggaatctcacaacttccctaagaaagagttttgagatgtgggaagcatcatccaccttgtggcatggtataaagtgtgccatcttgctaaacctatccaccaccacaaagatagagtctacacctctttgggttctaggaagcccaaggacaaagtccatactaatgtctacccaaggtgcaaaggggatgggtaagggtgtgtatagcccatgaggcatcaccctagacttggcttgtaaacaagccacacacctagtgcaatgcttatggacatctttc

SEQ ID NO: 18106 - DNA, 371 bp, Glycine max
  unsure at all n locations
ttcttctcgatatattatgcgcctgaatcagacttccgtttcaaaagttatgaacatatgaatttctccactgtattccgtgtgacaagtgatgaccattttaatttctcgatagcattcgttgttcaatttcgagcgtctcgatatattatgcgcttgaatcggacttccgtgtgacaagttatgaccatttgaatttctcgagggcttccgtttttcaatttcaagcttcgagatatattatgcgcctgaatcatacttccgtttcaaaagctatggccatatgaatttctcgagagcaattcgtgctcaatttcgagcgtctcgatatattctgcgcgttaatcggactttcgtgtgacaagntatga

SEQ ID NO: 18107 - DNA, 418 bp, Glycine max
tctcgatatattatgcgcctgattcagagtttcgttttaaaaggtatgaccattggaatttctcgagagcttccgatgttctatttcgagcgtctcgatatattatgcacctgaatcggacttccgtgtgacatgttatgaccattttagtttctcgagagtttctgttgttcaatttcaagcttctcgatatattatgtggctgaatcggacttccgtgtgacaagttatgaccatttgaatttctcgggagctttggatgttcaatttcgagcgtctcgatatattatgcccctgaatcggactttcgtgtgacaagttatgaccatttgaattcttcgagagcattcgttggtcaatttcgagcatctccatatattatgcgcccgaatcggacttccgtgtgacatgttatgac

SEQ ID NO: 18108 - DNA, 390 bp, Glycine max
agctattgagcaattgaaatgtgtcataacttttcacttggaggtccgattcatgcgcataatatatcgagacgctcgaaattgaacaacggaagctctcgagaaattcaaatggtcataacttttcaattgggggtcagattcaggcgcataatatatcgagaagcttgaaattgaacaacggaagctctcgtgaaattcaaatggtcataacttttaactcggaggtccaattcaggcgcataatatatcgagacgctagaaattgaacaatggaagctcttgagcaattgaaatggtcataacttttcactcagatgtccgattcaggcgcataatacatcgagacgctcgaaactgaacaatggaagctcttaagcaattcaaatg

SEQ ID NO: 18109 - DNA, 435 bp, Glycine max
tactcaagcttcatgcgagagtcaaagatcaaattgagaggaaaattattatctattctaaacaagccaacaaaggaagaaagaaggttgtcttcgaacccggagatcgggtttgggtgcacatgagaaaagaaaggtttccggaacagaggaaatcaaagcttcaaccaaggggagatggaccatttcaagtgcttgaaagaatcaataacaatgcttacaaagttgagctgcccggtgagtataatgttagttccaccttcaatgtctctgatttatctctttttgatgcagatggagaattcgatttgaggacaaatccttctcaagagggagagaatgatgaggacatgttcaagagcaagggcaaggatccacttgaaggacttggaggacctatgacaagggctagagcaaggaaagccaaggaagctc

SEQ ID NO: 18110 - DNA, 372 bp, Glycine max
agtcttttgtaccgtgcacgtggccgcatgaactgcaagaaagaaattatagcaccagcaaattacaagacttgccaatttctaaaagcttcaatgtagtgtttcattcttctgccttgtttaccaataacacaaattaaaatcactaagtaaccatgtgcacctgataatcagataatgcaccatatgatggattacaggaatcaccccaacgcccgtgtgggtattgatcccatcctattgtccttgatatgtagctctctggacgatttgccctatgatagttgcatatagaacgtaagaaatccttcagacagatacttcctttctatattttggaacacgacataccaattgcaaagaacataccaa

SEQ ID NO: 18111 - DNA, 404 bp, Glycine max
  unsure at all n locations
actcagctgtcggagggaatccatggccccggttaatttggtgnccatgacctccacggtgggctccttctcgggatccagcgtgcacacgaagatgtcaagccccggcagcttctcatccctcggcagcttctccgtcatgacgctccgcgacaccggccgccaccggaaggcttggctgaagaaccagagcaccgagagaagaagctccgctacggtcatcagaagccatggcgctgttggaggttccagtaacaagtgagttatgcggtagtaacacagcgacaacactgccactaagtggatcagcatgtgaagtctgctcagtgccaaccatgattgaacccgttcaacgcggtacgtgaacattggctatcttatgttctcctcgaatttctatatat

SEQ ID NO: 18112 - DNA, 379 bp, Glycine max
agtttatgctgcaaacatttataatagaccccttcagcagcaaaatcaacaacaacagaataataatgatctttcaagcaacagatgcaatccaggttggaggaatcatccaaatatgagatgggcaagtaagtcatatgttcctcctccaatgcagcaataacaaagacaacaagcaactgaggcacctcctcaaccttccttagaagagttagtgaggcaaatgacaatccagaatatgcaatttcaacaagagacaagagctccattcagagtacgacaaatcaaatggggcatatggctactcagttgaaccaagctcagtcctaaaattctgacaaattgccttcacagactgtgcagaatccgaaaaatgtga

SEQ ID NO: 18113 - DNA, 345 bp, Glycine max
agcttgtaatcgattactagaggagaatttcataaaataattttcaagagtcacatctgttcaaatgattttttaatagccatcaaaagtctatttatatatgacttagaacacaaatttgcttagagtttttcagaacaaaaaggtcttattctctcaaaagcaaaatcatcttatcctcttagaaattccttggccaatacgcttgcaattcaataagaaattattagagcgctcaattgttcaatctatctctttcaagagatatttcttcttctcttcatcttatttcaaaaaagggattaagagaccgagggtctcttgttgtaaagcaatatgaacaca

SEQ ID NO: 18114 - DNA, 382 bp, Glycine max
  unsure at all n locations
agtttgttccacttcacgtctataatatgaatgtagcatatagatccaaagacccttacgtgctttgctgatggcttcttaccgttccaagcttcaattggggtcttgtcttttatagacttagttggacatctgttgagtatgtaaatagcagtgtagactgtttcatcccataatgtgttaagtagtcccttctccttgagcatcgatctagccatttccataactgtgcgattctttctctcggacactccattgtgttgaggagaatatgcgactgtaagttgtcactcaatgccttcatcctcacaaaatctttcaaactcgcgagaggtgtactctntgccgtgatcacttcttagtacttttatccgttttccac

SEQ ID NO: 18115 - DNA, 334 bp, Glycine max
taataagaggcatgctaagtgggtagagtttttagtgcaatttccatatgtcatcaaacataaaaaggggaaagggaatgtagtggctgatgcactgtctaggagacatgctttacttgctatgcttgaaactaaactgtttggtctcgagtctttgaaagacatgtatgtgcatgatgtggactttgctgaaatttttgctgcatgtgaaaagttttctgaaaatggttactataggcataatggattcttgtttaaagcaaataaattgtgtgtgcctaagtgttccattagagagttgcttgtgagtgaatcacatgagggggggttgatg

SEQ ID NO: 18116 - DNA, 273 bp, Glycine max
  unsure at all n locations
ttttcacaatatttaccaacaacatgagaatcatagtatgggttggttntgagaaaatgctcaggatttgtggtgcttgcaataatgattttaacccaggcattatgtacatgtacatcttggattccttcacttacaagatgctccaagaattgagtancaagcggagacgattcctatgcataanaaattaaatgagaaataaacatggcaatgatagtggagatgaaagctagagagaaaactagcacacctcttctcacattcttcaac

SEQ ID NO: 18117 - DNA, 356 bp, Glycine max
  unsure at all n locations
agttttttctcttgcctcctatggnggagagcttcttctagactcatcttctccttgaagtggcgtctcctctctctcttcctttctccattccgctgccattcatcttccaagaagcaaaggaatccattgatgaagaagatcctaggcctacaagctccaatggagcttgcatcacattattaccaaagcattaggaaggcatcaatttcagatattgcttggcaagctgggcattcgtaatcctcatgcaccaccttgagggggggggggtaataccgtatattccaatggtcgtattcaaggcataatcatctggatcgttctgcatgggttaactaatatgttattccctt

SEQ ID NO: 18118 - DNA, 385 bp, Glycine max
  unsure at all n locations
atcttatttcgttgtntgctaatggagacgacgcaatagaccttacatggcatgcaaatgggagaaactgcgatggaatgctccgtcatctggctgattcctcgcagtggaagaagattgatcgtttgtatccggatatcagcaaagaggaaagaaatcttatgcttggagtagctagtgatggaatgaatccatatggcagtttaagcatgcaacacagttcatggccagttntgctagtaatttacaatttgcctccctggttgtgcataaagcgaaaatacatgatgttgtctatgatgatatcaggcccaagacaaccatgaaatgacattgatgtttatctaactccgttgattgaagacttgactaagttatgggagat

SEQ ID NO: 18119 - DNA, 385 bp, Glycine max
  unsure at all n locations
tgctttcntttcctctctttttcatgtgctatttctaccctgtcattcattaagctttgtaattgatcctcaacctcatgccttaactttgaaaaaacctccatttctgaatcaatagcagctcgctccttagtcaatgcaaggttatcttcttctctctcagctcttaacctttccaactcaagtcttgcctcctcagccattctttcaacagcactgatcttttccctctctatgaaaagctcctgctcaaaacttgcattgatatccttctctacttgagctactaaagcactatgcgcagcaacagcattttcagcaacagattctgcttcaatgcgtgcaagctcttcactaactatttcagaagcatctccagtagcta

SEQ ID NO: 18120 - DNA, 424 bp, Glycine max
  unsure at all n locations
tgcattanggctgctggtcttctcgctctcttctcctacgctctttagcacagacaacatgttcttccggaaggaccgcacaagtggccaacccaccacctgcgtcctacacatttcaactcatcaatatcactttatatattatgatcaattaatacgcatcatgaacatatatggtaatcatataacgaagttaaaataagttaattgattatatatagaagaacgtacgttctaggtgactttgaagtattagctgattagttatcagagacaattatataattgggggtggctgagagccatataagcttgcataaaaataaagattaattaaacacgtaaaagactttgtttctaatttatgctaatccaaggccaccctcctttatatatctttaaaatgactcattgttatattact

SEQ ID NO: 18121 - DNA, 395 bp, Glycine max
tctgctttattacagctttgatactctcccttgaggttgcaccctcaggccagtccaatctaccccttctaacatacttctcagcatgtcggctaaacatttgcatgacacaatacatacttatttatcatattttaaggatcaatcaattgagattaagttcgcatggtatgtcacttactcgactctcttcaacatgggctgtggtaatggaccaagtaccctttccatcatggcaagatgctccaaattttcgtgagtctgaaacaaagctccgccctgtaatataaattcacaaattatggaatagaatctaagagatggataaatactgtttttatacaggatttgagagagccaaacataccgtgcataactcaaccaagatacatccc

SEQ ID NO: 18122 - DNA, 328 bp, Glycine max
  unsure at all n locations
taagcttaagaaatctctntatggacttaaacatgcaccgatgcaatggtatggtagacttagaaacttccttcttgaacaaaaatttgagagaggaaaagttgataaaacacatttcattaaaaagttctctcataacattttactcatgtaagtttatatggatgacatcatttttggttctactaatcgatctctttgtgaagattttgtacacaagatgcaggaggagtttgaaatgccaataatggggggggggattaaattactttcttggtctctatgtgaagaaaaattgaccatgaacatttttctatcaaacaaagta

SEQ ID NO: 18123 - DNA, 379 bp, Glycine max
  unsure at all n locations
agcttgctcnctggagttttccgactatgctcttgtatggtggaacaagctacaaaatgagagagcatgaaatgaagagccaatggttgatacatggacggagatgaaaaagatcatgaggaagcgatatgtgccggctagttactcaagggacttgaaattcaagctccaaaaacaaacccaaggaaacaagggggttgaggagtatttcaaggaaatggatgtgctcatgattcaagcaaagattgaagaagatgaggaggtaactatggctcgatttcttaatggtttgactaatgatatccgngatattgttgagctaccggagtttgttgaaatggatgatttgcttcacaaagcaattcaagtagagcaacaa

SEQ ID NO: 18124 - DNA, 429 bp, Glycine max
  unsure at all n locations
agcccaccatcttttcatagtagatttctggtaatgtgtctactatcattggcatttttttttccgtcattgaggtttcacttgagctgccaggtctctccacctttgggcgtattcttttgaaagattcgtgccccctttttgcacatgttttgtagttgcatcctatccgaagccattatactaacactgcctaacgaaggcaaccactaggtccttccaagaatggactcgggaaggttccaagttagtgtaccangtaacaactaccccagtaagactttcttggaaggaatgtatcagcaattcctcatcttttgcgtatgcccncatcttttgataatacatctntagatggttcttggggcaagtagtccccttgtacttgtcaaagtctaccaccttgaaacttgggtggggtgatgatat

SEQ ID NO: 18125 - DNA, 355 bp, Glycine max
  unsure at all n locations
gacctataaaactcagcttcacatcagacccttcttgtgtctggactactttcatggacttgatggggcctatgccagttgaaagccttggaggaaagaggtatgcctatgttgttgtggatgatttctccagatctacctgggtcaactttatcagagagaaaacagacacctttgaagtattcaaagagttgagtctaagacttcaaaggagaaaaagactgtgtcatcaagagaattatgagtgaccatggcagagagnttgaaaacagcaagtttactgaattctgcacatctgaaggcatcactcatgagttctctacagccatcacaccacaacaaaatggcatagttg

SEQ ID NO: 18126 - DNA, 398 bp, Glycine max
  unsure at all n locations
tcaattggagtcttgtcttttacagacttagttggacatctgttgagtatgtaaacagcagtgtagactgcttcagcccataatgtgttaggtagtcccttctccttgagcatcgatctagccatctccataactgtgcgattctttctctcggacactccattttgttgaggagaatatgcgactgtaagttgtctctcaacgccttcatcctaacaaaatctttcaaactcgtgaaaggtgtactctttgccgcgatcacttcatagaacttttatccgttttccactttgattntcagcaagggccttgaacttttngaatactccanagacttctgattcttcttttagaaaatatacccatgtcattctagagaagtcgtcaatgaagagtat

SEQ ID NO: 18127 - DNA, 347 bp, Glycine max
  unsure at all n locations
tgtggccgaacaagtataaatctgagtttgcattttctcttcccttaaactcctttattggttattggttattgcttattatttctatttaataaagttaatttgcattattatttaggagtacatttttaaaaggaatcttgggttattgggataaaatcaaaataaaattttttgattaggaaaagattgtgatatcttaattcaaccccccttcttaagatatctgaggccacttgtccaacagagagtcttttgcgcttagagcacaggcgcgcttagcgagagactatgtcacgctcagtgagataactcaattagcactatntttaaaaatgcacaacctg

SEQ ID NO: 18128 - DNA, 394 bp, Glycine max
agctaattatttatagctggaggagataaggttgaatgtttatgaattgtccaagctgtacaagcaaaaggtgaaagcttaccatgacaagaagctattgaagaagaatttccaaccaggccaggaagtcttacttttcaattcaagactcaatctatttccagtcaagttgaagtccaagtggtctggacctttcaccatcaaagaggtgaagccttatggagcagtggagttgatggatcctcaatcaaatactcctaagagaagttgggtagtgaacagtcaaaggttaaaactgtatcatggtggcagcattgaaaggttaaccaccatcttgcacttgcaagacccctatagggtgacatatgtcaagctagtgacggtaaagaagcgc

SEQ ID NO: 18129 - DNA, 396 bp, Glycine max
  unsure at all n locations
gaagtgaaggcacgctatgatggaactggggctgncacatcctggctttttccagtctgcatggagattntcaacaacaacatgggcaatgctcccaaccaaaataaagacaatgaaacgcgaagatggcgcaaacataaccgagcaagacctcttgcagataccaagaggagcctgcaccatggaaggtctcagatttatggttatatgcttcttaatttaattattaaactcttaataaatatcttaagtcacttgagccttttttcaatttaattagtatttttttattaaaacattgtcactagtatgtgattaacctatctctttgttattgatacaagattaagctattcttatctcaagttattttattaactatgctcttattggaca

SEQ ID NO: 18130 - DNA, 374 bp, Glycine max
  unsure at all n locations
tctttcttncatttgtactgncttcatgtgattcctttttctccctctacgattattatctcgcacatcccaatggtgaaagtgtgcgaaattgagtctcgaacaatgtatcaaaatttcggaaaaatccaacggttaacgaatccggaatcatagttttaccgagacagctttgagtttctgcgaaaaaagaaaaagtcacgatgcgaacaatagttctctcatctccaacatcttttcgtaattcccaacggtgagaatgctcggaattgagttgtgaaccattttcttaaatntcacgacgaaccaacgatgaatgagtccgagatcgntcattttctgaaacagatttgatggtctgcatgataaagcga

SEQ ID NO: 18131 - DNA, 392 bp, Glycine max
  unsure at all n locations
tgcttcaagaataatggcctcagcaaacttcttatttccagaaggaaattcaatcaatagacctctaatctttaatggagagggttaccactactggaaaacctgaatgcaaatttttattgaggcgaagccatagaaatagggccttatatacccactacagtagaaagaaccacaatagatggaagcacaacaagtggaagcacaacaatagaaaaacctagagatagatggtctaaagaggataaaagacgagtacaatataatttaaaagccaaaaacataattacatctgccctgngaatggatgaatatttcagggtttcaaattgtaagagtgctaaggaaatgtgggacactttacaagtaacacatgaacgcacaacagatgt

SEQ ID NO: 18132 - DNA, 371 bp, Glycine max
tagcttgtgcctcttcacgtctgaaatatgaatgtagaatatagatccaaagacccttaggtgctttgctgatggcttcttcccattccaagcttcaattggagtcttatcttttacagacttaattggacatctgttgagtatgtaaacagcagtgtagactgcttcagcccagaatgtgttaagtagtcccttttccttgagcatcgatctagccatttccataactatgcgattctttctctcggataatccattttgttgagaagaatatgcgactgtaagttatcgctcaatgccttcatcctcacaaaatctttcaaacttgcgagaggtgtactctttgtcgcgatcacttcttagtactttta

SEQ ID NO: 18133 - DNA, 431 bp, Glycine max
  unsure at all n locations
cttatgcctggatttgatcctgaaattattcaagtggctcagatggtccttataaatccccggaatattgactatcatactggagtttttgcaaccaaggtaacaacatcttgtaatttcttgatataattttaattggctactatgacatgctacacagtcctcatgtttgttgtatagatcacgcctgcaagggatggaaaacctgtcttgattgaacttattgatgcgaaaaccaaggagccgaaagacacgctggaggtaacttaatctttttcagaaagcttttagggttatatctctttgntattatcaattggaaacatttctcccatgagagaanggagaaaattattatgtgtcggtagaacttagaatatctatacnaagtatattgtattatatcttagaatgtttatactatcttaatg

SEQ ID NO: 18134 - DNA, 390 bp, Glycine max
  unsure at all n locations
tttgctcatctagatctgagtggaaattctcttcttggagaaatcccctctgaagtatggaagcttacagccttacgatatctagatctaagttataatgtggctattcatggagagatcccttatcactttaaaaatctctcacaactgcaatatctttgtcttagaggacttaatctttccggaccaatacctttccgggttgggaatcttcctatcttgcatactcttagacttgaaggcaatnttgatcttaaaattaacgatgcaaagtggctatcttctctctctttnttaacaactcttgacctgacatcattgcataatcttggctcctctcgttactggcaacaaatgatcggtgagcttataacacacttgagagagttg

SEQ ID NO: 18135 - DNA, 300 bp, Glycine max
cacatacatgcgccaacgaaccaaatagcacacaaaaagagtacaaggcgggctaaacgggacttacaggaaacgcattatagaccatgtgatgctcaatatcaagcaagctcccagtctccagacacgaaagtctgtgaactggaaagctagttttcaaaaactgttccaatcgatgcgcatcgatgttgtatctatagcctccgtctccgctaaaaccaatcagaaccacgttcacttccagcggaacttgaaacggaacctacacgaaccacagacacatgcattcacacatcaatt

SEQ ID NO: 18136 - DNA, 396 bp, Glycine max
  unsure at all n locations
agcttcttatccaaggcaattcttggtggtgaagctccttcttccttggcttattccctagtggatggtgcctcctctctccttttctcctttgccttccgctgcatctccatggtgtaaaatcaccattgaagaacctcattgaagctcaaagatccagcctccatagaagctccacaagcaagcttccatcacaccctttgtgcatgtccttcatgttttacatgcctcatgacacctaaacacacttagtagagaatcttgaatttgatcttggattagtgggctgaaccatagctganattcactaatcataattagtgaaatgttggctccacaaattcaagttcaaattcaagtgaaatttgaatagaaaatcaaaattccctccaattt

SEQ ID NO: 18137 - DNA, 394 bp, Glycine max
agctccacgcatgtaagtacaatctcatcaggtgcaagactatcacagatgtcttgtcttgtaataaataaatcagctagaactgaagctgcatattcttgggtttcctcatttgatgaattgaggacttgaactagagatctcaagcctttattagctgcagaacccttttcaaggagatcattctgcgaagccatagtaagaacatgacctaaaactcggattatgtgggtttttgagcttggagaatgccctatgagcaatgctaatagctgattaattgtggcagaatcagctactcggacaagctttgtgagtgccattgcagaagcttcctgtcctcttggtccaccactcttaagaagccacaaaaatgctgggatggctccagcac

SEQ ID NO: 18138 - DNA, 383 bp, Glycine max
ttacttctggtgggacatcttgacttgctttccaatctgacattcaccacagattctgccttcttctattttcagattgggaatgcctctaacagcacctttgtcaatgattttcttcatgcctcttaagtgcagatgtccaaatctttgatgccatattctgacttcatcttctctggagaatagacatgtggaggagtaactggtttcttgaggtgtccataggtaacagttgtcctttgatctactgcccttcatcagaacttcactcttctcatttgtcaccaagcattctgactttgtgaagtttacattgaatccttcatcacacagctgactgatgctgatcaagtttgcagtcagtcccttcaccagcagtactt

SEQ ID NO: 18139 - DNA, 348 bp, Glycine max
  unsure at all n locations
tatgttgcaaacatttaaattatacctcctcagctgtctaaccaacaacaacagaataattatgacctttcaagcaacagatacaatccaggttggaggaatcatccaaatctgagatggacaagttctccacaacaacaacaacctgtccctccttttccagaatgttgctggtccaagcaagccatatgttcctcctccaatgcagcaacaacagcagcagtcacaacaaagacaacaaggaactgaggctcctcctcaaccttccttagaagagttagtgaggcanatgaccatccagaatatgcaatntcagcaagagacaagagcctncattcagagtctgac

SEQ ID NO: 18140 - DNA, 336 bp, Glycine max
  unsure at all n locations
agtttgttttgtttaatccgcacgaangacacgtgctcatgcaacaattggtaaccgatgctataccagacatatttccaaacaaagtcaggttcacgataactcacctgcgctcttgcttccatgctatatgatacacagtgattgatccaataatattcgatgagtcggaaaatgatgccgcaattatactgtgccagcaggagatgtatcatccccctgttatcgttgacatcatgattcacttgaatgagcatctggtctgagaaatcaaatgttgtggtcctgattatctacggtggaagtacccggctgaacgatacatgaagatctcaa

SEQ ID NO: 18141 - DNA, 323 bp, Glycine max
tatattattggcctgaatcagacatccgaatcaatagttatggctgtttatttatgccatgtgcttccatgttcaattgtgaacatctcgatatattatgcgcctgaatcgggcatctgagtgaaaagttatgtcatatgagttagccgagagcttcgctggtcgatttcaagcgtctcgacatattattggcctgaatcggacattcgaggcaaaagttatggcgggttaaactttccatgcgcttccatggttaattttgagcatctcgatatattatgcacctgaatcggacatctgagagaaaagttatgccatatgag

SEQ ID NO: 18142 - DNA, 389 bp, Glycine max
  unsure at all n locations
tagtttgtgtctaagnngcaatctgctattccgatgatagtgaccacgcctgagaaaagggataccattacacgcaagagcagggacatatcattgaccatggtggtaaagctcttaattattgatgaagtccatctactcaatgatgatagaggtcctgtgatagaggctctagtttccatgaccctacggcaggtaacgcatatgtcttatttcctctgtgtttttacatgtacaaatttagttaggagattcgcttaaatttattatattctcttttggatatatgaataatcagacattggcttatgacagctaacctgatatctatcttacttgttccacatataaagcgagctttcttattgatcgattttgcgttggcactt

SEQ ID NO: 18143 - DNA, 338 bp, Glycine max
  unsure at all n locations
agctttgttaacaagaatttcatcaacgagtcaagacatgaaaaaagcctgacgagtaaatctttgtttagaagtacaaatgtgggatgagtttaccagtgttagctatgttatgactctaaataattaagttttgttagtttattgtacttttttggttcatttattgtaataaaaaatctaaattactttaaattagatcggtttgaattaaataataactaattagataataaaatataaaatccaatcaataacataagacttgaataatntttattgtctaataacgataataagatttcaacttaagatttatttaaattgctcactatatt

SEQ ID NO: 18144 - DNA, 343 bp, Glycine max
  unsure at all n locations
agtttctggtgggacatcttgacttgctttccaatctgacattcaccacagattctgccttcttctattttcagattgggaatgcctctaacagcactttcgtcaaagattttcttcatgcctcttaagtgcagatgtccaaacctttgatgccatattctgacttcatcttctttggaggatagacatgtagaggagtagctggtttcttggggtgtccatatgtaacaattgtcctttgatctgctgcccttcattagaacttcactcttcttatttgtcaccaaacattctgactnntgtgaagttacattgaatccttcatcacacagctgactgatgc

SEQ ID NO: 18145 - DNA, 417 bp, Glycine max
  unsure at all n locations
tgtttcaattcanatgacaattacctttactttatatcntgatgagtcccgtaatataacgagacgctcgaaattgaatgttgaagctctgagccaattcagacgacaataactttttactgggatgtctgattgagtcccataacatatcgagacgctcgaaattgaatgttgaacctctgagccaattcaaacgacaataaagttttactcggatatctgattgagtcccgtaatataacgagacgctcgaaattgaatgttgaacctctgagcaaattcaaaagacaataactctntactcggatgtttgattgagtcctgtcatatatcgagacgctcgaaattgatgttgaaactctgcccanatcaaacgacaatagacttttactccgatgtctgattgagtcccgtaca

SEQ ID NO: 18146 - DNA, 388 bp, Glycine max
agcttgtttcctatggaagctcctaatatctcccacactttttggggtgggccattcttggatggccttgattttctcagggttcacttggaccccatttctaccaactacaaaacctaagaaaactatattatctacacaaaaggtacacttctctatatttgcatagagggtgtttttcctaaggactgaaagaacttgtctgagatgtcctaagtgaaaatctaggctcctactatacactaaaatatcatcaaaataaacaactacaaatctacctatgaaatcccttaagacatgatgcataagcctcataaaggtgcttggtgcattagtgagcccaaaaggcatcactagccattcatacaaaccaaacttggtcttgaaa

SEQ ID NO: 18147 - DNA, 443 bp, Glycine max
  unsure at all n locations
gcttatctcacactntctatgttaatattaattcatttgtgtctattcctcactctcagacacccccttattgtgtgtcattatggcatggccaacttgccactgtcttttcattttccccccttcttgttttgttatgttacttttcagattgtcttttctgttaatcataattttaggagtgtcagatgttactcttgtttgattggattttatagttttttttaatcattcattcagttaacgaagaaaaataaattattttagattaatttatatgcttaaatatatgtttttatcttttgttttacattcttattaatttatgaataaattaataaatttggatttgtatctgataatattttttatttataattagttgaaatntanaccaacattattatattatgataaaataaatataaagtctctgatttaat

SEQ ID NO: 18148 - DNA, 398 bp, Glycine max
agtttactctgcaaacatttataatagacctcctcagtagcaaacccaacaacaacagaataattatgacctttcaagcaacagatacaatccaggttggagaaatcatccaaatatgagatggacaagtcctccacaacaacaacagcctgtccctcctttccagaatgttgctagtccaagcaagccatatgttcctcctccaatacagcagcagtcacaacaaagacaaaaagcaactgaggctcctcctcaaccttccttagaagagttagtgcggcaaatgaccatccagaatatgcaattttagcaagagacaaaagcctccatttagagtctgacaaatcagatggggcagatggctgctcagttaaaccaagcacaatcccaaaattctg

SEQ ID NO: 18149 - DNA, 378 bp, Glycine max
tgtagggttaaagtctcattattatcacgtgctcatgcaacaattgttattcgtggctatacgagacattttgccaaacaaagtcaggttagcgataactcacctgtgctttttcttccatgctatatgtagcaaagtcattgatccagtcaagtttgatgagttggaaaatgaggccgcaattatactgtgcgagttggagatgtattttccccccgctttctttgacatcatgattcacttgattgtgcatttggtcagagaaattaaatgctgtggtcctgtttatctacggtggatgtacccggttgagcgatacatgaagatcttaaaagggtatacaaagaatctatatcgtccagaagcatctattgttga

SEQ ID NO: 18150 - DNA, 380 bp, Glycine max
agctttatctaaattgagagttgtcaagcaatcaattttaaaataaagacatttaatccttatatttttaaaaacatttaactttattttcttattttaaaatagaaacatttaatcgtttagctttgtaaaattcacaattctaacctttttatcaaatttaaaaaaagttgattaataagaaattaactttaagtgattcaaaattatattatttatttaatctacatcatagttaatattaatatcttaaatgttaccctttcagtttcacataaagatcaaattcaccaattttacatgtgagactaaatgtctttattttaaaataaaaaaaaaattaaaatgatatatttcaaaagaaaactaaatatttttat

SEQ ID NO: 18151 - DNA, 375 bp, Glycine max
  unsure at all n locations
agtttnattatatcgagatgctcgaaattaaacatcggaagctctcgagaaattcaattggtcataatttatcacacggatgtccgattcgggtgcataatatgtcgagacgctcgaaattgaacaacggaggctctcgagaaattcaaatggctataacctttcacacagatgttcgattcaggagcatcacatatagagacgtacgaacaacggatgcactcgagaaattcaaatggtcataacttttcacaccgagttccgattcatgcttataatatattgatacgttttgaaataaacatcggaagctcacgagaaattcaaatggtcataactcttcacacggatgtccgattatggagaatcacatat

SEQ ID NO: 18152 - DNA, 407 bp, Glycine max
  unsure at all n locations
gcttcatgagagagtcaaagatcaaatngagaggaaaaattttagctatgctaaataatccaacaaagggagaaagaacgttgtcttcgaacccggaaattgggtttgggtgcacatgacaaaaganaggtttccggaacaaaggaaatcaaagcttcaaccaaggggagatggaccatttcaagtgcttgaaagaatcaatgacaatgcttacaaagttgagctgcccggtgagtataatgttagttccaccttcaatgtctctgatttatctcttnttgatgcagatggagaatccgatttgaggacaaatccttctcaagagggagagaatgatgaggacatgaccaagagcaagggcaaggatccacttgaaggacttggaggacctattgatgangacatga

SEQ ID NO: 18153 - DNA, 396 bp, Glycine max
  unsure at all n locations
agttttgcttttctaatttagnagatccatgaaggtaccctaatgtctgaagtttatgggattaagatggtcattgaccaatccctattttatgacttaacaaaattgcctagtgaaggtgtaccttttgagggtgcactgattgatgaatggaaatttgatttctctgtgcatgatgcccgccggttggtttgcaccaaccaagcggatatgaccggaagacttctttccgtttcattggcttttgagagccgcatcttccattaccttattgctcgcatcttactccctagatcttcaaaccttgcttaagtttctgaagaagatctcattgtcatgtgggcctttcataaaggtttacaaattgattgtgcacaccttgttagatatcgcatg

SEQ ID NO: 18154 - DNA, 434 bp, Glycine max
  unsure at all n locations
tttgtggctaactccgactactgaaattgaccctttccaacaactggtttagaggcgccacaatcttagcataccctntaataaatcgtctataaaagcctaccaacccgaggaagcttctcaatgcttttactgattgaggtagaggccactcctgaatagcgtataacttttctggcactggttcaactccgttgccggagacgacatgccccaggtactccagttgggactgggcaaaagtgcatttggtacgtttcaaagagaacttccctganagcaagagtttgaacgcgctntcgaggtgacccanatgatccgccatttgtttgctatataccagcacatcaccgaagatgacgatgatgaacctgcgcagaaagggttgaaagagctgattcatagttgctttgaaggtagatgggtcgttacac

SEQ ID NO: 18155 - DNA, 361 bp, Glycine max
agcttttggagtttggggaagaatgccttactaaaatatacaatgaggtgggaattttgcatcaaaatagctcccatggttgtgccagaagcatcagattccaagacaaatgggatggtgaaatctgatatcgctaagacaaatgggaattttgcatcaaaatagctcccatggttgtgcctccgccattagtgacttgagtttgtcaaaggtgacctgagaggtaggattccaaaggaactgatcctctcgcaagagcactatcaatggtgcggctacggtggcgtaacctcgaacaaacttctggtaaaaacctgtaaggcccaaaaatccttgcaactatgatggagatgatggggat

SEQ ID NO: 18156 - DNA, 429 bp, Glycine max
  unsure at all n locations
taacagatgtgttacatcgctntgcaggcacatgttacatttcaccaaaagaccacccatagaatgagttataatatttatcttcttccctcctgcagcattataaattgattctaactttgcagctaaccgatccattgtttccttcaacctaaatgaaataaacagagcaattgtaaaaaaaaatatctttcatttggttaaatactttttagagaacttatccttaggattgtgggaaatcataccaccaagcaatagccaaaagatacactggagagacatcaatcagattaaattcatttgcacaattacatcaatcagctgatagcttcctcagaaaacttatcatttcataataataacaacaaactatgaaaatactctgcataatntttacaaaatcaattcattattaaaaaaaatata

SEQ ID NO: 18157 - DNA, 416 bp, Glycine max
  unsure at all n locations
tncctctaaatntaaaatatgcaacaaacattgctattaaggtacaaatggattattcatggctatcgcatcaaagatttggccacttcaacacacatgccttgaagttgttacatgagaagaacatgatgagagatcttcaaagcataaaggagaacattgaagtgtgtgaaggatgtctccttagtaagcaacaccgatttcctttctcaacaagcggagcatggagagcgaaagatctattggagctgatacatacggacgtttgtggaccaatgaggacgccatcacatgagaacaacagatacttcatactctttatcgatgacttctcttgaatgacatgggtatattttctaaaagaaaaataagaagtctttggagtattcaaaatttcagggccttgctgaaatcaa

SEQ ID NO: 18158 - DNA, 435 bp, Glycine max
  unsure at all n locations
atggcctcagcaaattccttatttctataaagaaattctatctacagacctccattctttaatggagagggttaccactactggaaaacccgaatgcaaatttttatcgaggcaatagatctaaatatctgggaagccataaaaataaggccttatatacccaccacagtagaaagagtttcaatagatggtagttcatcaagtgaaagcataaccatagaaaaacctagagatagatggtctgaagaggatagaanacgagtacaatacaacctanaagccaaaaacataataacatctgccctaggaatggatgaatatttcagagtttcaaattgtaagagtgctaaggaaatgtgggacactcttcgattaacacatgaaggaactacagatgttaaaagatctaggataaatgcactaactcatgagtat

SEQ ID NO: 18159 - DNA, 354 bp, Glycine max
tatgtttgaccaggaattatttggatgggttggatgttgagttcaagttgttcctggtgtggagatgatgggacagatggtgaaccagaagctgcagtttcttttgatgaggtagccatggaaaagcacatcgtttggaatgatttcgtaaatctcagaaaactattgggaaatgctgatgaaaacacgaatgtcaagcagatatatatttgaatgaggaatgtagagggccgtgtgaagcaacggtcgaattttccttggttcagtagtgaacgtgctattaatgctaagtgattcgtttgggcacgttcatattgctcgaattgctataattcctctatcacacaaatgccc

SEQ ID NO: 18160 - DNA, 412 bp, Glycine max
  unsure at all n locations
tgattagctgccgtagcagcaacaatatattctgcttcacatgttgacaaagcatctacactttgcttctttgagcaccaagagattggtgttgttcaaaatttgaaaacatacccagtagtgcttttcctatcatccttatcaccacaccaatctgaatcactataaccaataacttctccttctatattcttctgactgtaaggatataaaatgccaagatccaatgttcctttcacataccttagaatcctctttgctgctaggaagtgaggtgtctttggtttctccataaacctgcttatcaacccaacacaataagcaatgtcaagcctggtgttacatatgtacctcagtgagcctacaacttgcttgtacaaggtangatcaacttctttctcatccncatcta

SEQ ID NO: 18161 - DNA, 380 bp, Glycine max
agtttctattctcaatttcgagtgtctcgatatattacgggactcaatcggacatccgagtaaaaacttattgtcgtttgaatttgcttagagcatatattctcaatttcgagtgtctcgatgtattacgtgactcaatcgaacatccgagtaaaatgttattgcagtttgcatttgcaacaagcttctgatttcaatttggatcgtctcgatctatgatgggactcaatcggacatccgagttaaaagttattgcggtttgcatttgctacgagcttccgctttcaactacgagcgtcttgatatattactggactcaatcgaacatcagaataaaaagttattgttgttagaatttttttcagagcctctgttttcca

SEQ ID NO: 18162 - DNA, 390 bp, Glycine max
  unsure at all n locations
tcaaccaaagggagatggaccatttcaagtgcttgttagaatcaataacaatgcttacaaagttgagctgcccggtgagtataatgttagttccaccttcaatgtctctgatttatctctttttgatgcagatggagaattcgatttgaggacaaatccttctcaagagggagagaatgatgaggacatgttcaagagcaagggcaaggatccacttgaaggacttggaggacctatgacaagggctagagcaaggaaagccaaggaagctctccaacaagtgctgtccatactatttgaatacaagcccaagtttcaaggagaanagtccaaggttgtgagttgtatcatggcccanatggaggaggactaaatgacaccactttgtct

SEQ ID NO: 18163 - DNA, 394 bp, Glycine max
  unsure at all n locations
agcttctacattcaattttgagcgtctcgtaatattacgggactcaatcagacatccgagtaaaaatttattgtcgtttggattggctcagagattcaacattcaatttcgagcgtctccatatattacgggactcattcagacatccgagtaaaaagttattgtagtttgaattagcttagagcttcaacaatcaatttcgagcgtctcgttatatcacgagactcaatcagacatccgagtaaaaagttattgttgtttgaattggctcagagcttccacattcaattttgagcgtctcaatatattacgggcctcaatcagacatccgagtaaaaagttattgtcgtttgaattggctcagagcttcancattcaatttcgagcgtctcga

SEQ ID NO: 18164 - DNA, 414 bp, Glycine max
  unsure at all n locations
ntgagcaaattcaggcgacaatatctttttactcgcatttctgattgtttcccgacatataacgagacgctcgaaattgaatgtcgaagctctgagccaattcaggcgacaatatctttttactcggatgtctgattgaggcccgtaatatatcgagacgctcgaaattgaatgttgaagctctgagccaattcaaacgacaataactttttactcggatgtctgattgaatcctgtcgtatatcgagacgctcgaaattgaatgttgaacctctgagcgaattcaaacgacaataactttgtactcagatgtctgatatgggctcgtaatatatcgagacgctcgaaattgaatgttgaagctctgagcgaattcaaacgacgataacttgttactcggatgtctgattgagt

SEQ ID NO: 18165 - DNA, 301 bp, Glycine max
ggcttcttctaacacgctccacactttgtagggtgggccattctcggatggacttgaattcctcataggccacctgagccccatttttaccacactctaaaccctgagaaaactatattatctactcaaaaggcacatttgtctatattagcatagacggtatttatgctaaggactgaaagaacttgcctgagatgtactaagtgatcatctaggctactactatacactcgaacatgatgaaagtgaaaaactacatatctacctatgaaagaccttatgacatgacgcatagccctca

SEQ ID NO: 18166 - DNA, 299 bp, Glycine max
  unsure at all n locations
ttggaactttgagcttgttttgctacttttaaaagttggatccaagcctagctctagaccctgtggcatggatgctgccggctacaacaatatgctggctatgctttgggagaatgcgatgctgacccaagccgagaccttgatcgaagaactctgctctaaatctttgagccccgatgtgcccactcataggaccttgattgaagtctacttgagaatggacaggatcgatgatgctctcangattttccacagaatggttgattctaggctcagggtggttgctacctttggtaaca

SEQ ID NO: 18167 - DNA, 369 bp, Glycine max
tttagcttaagctcctacaactgcacaaggctcttaatgtttgaagagtatccttgaggaaccttcacccgactaagacactgacaaaaacttatcttctcctttttggacaaggtatggcaagctaggggcaagtaaattttcttcccattaaaccttggatgcaactgtgatcgtatgcccatatcaactagatcttgacaggtattgaagccatgcttcatcttgccttgaatgttaaggagagtaccaatcacactatcacaaacatttgtctccacatgcataacatcaatacaatgtctaacatcgagatcagatcagttcgaaagatcaaagataatggacctattcttccatatgcaactc

SEQ ID NO: 18168 - DNA, 406 bp, Glycine max
agcttgctaacttatggaagctcctaatatctcccacactttttagggtgggccattcttggatggccttgattttctcagagtccacttgaaccccatttttaccaactataaaccctaagaaaactatattatctacacaaaaggtacatttctctatatttgcatagagggtatttttcctaaggactgaaagaacttgcctgagatgtcctaagtgatcatctaggctcctactatacactaaaatatcattaaaataaaaaactacaaatctacctatgaaatcccttaagacatgatgcataagcctcacaaaggtgcttggtgcattagtgagcccaaaaggcatcactagcaattcatacaaaccaaacttggtcttgaaagcagttatccattcatc

SEQ ID NO: 18169 - DNA, 422 bp, Glycine max
gaatggaggctctggtctcttgttgaaactgcatgttttgcatagtcttttgccttatcaagttcttcaagggaaggttccggaggagcctcaactatttgttgtttctggggctgttgctgcttctgttgttgttgttgtagctggattggtggaggaacatctggtctgcttgggccagcagcattatgaaaataaggctattgttgttgctgctgttgtgaaggactcaaccatctaaggttgggatgattcctccacccgggattgtacttgtcgttggagaggtcataattgttctgctgtggttgattctgctgctgaggttgaggaggtctattgtagatgtttgcagcataagctttaggctgttcaattgctccagattgctgcacaaaagggcaaaggtctgtatggtggtc

SEQ ID NO: 18170 - DNA, 267 bp, Glycine max
acgtgcacatgcaacaattgatagtccgggctatacgagacatcttgccaaacaaagtcaagttcgccataactcacctgtgctttttcttccatgctatatgtaacaaaggcattgatcctgtcaagcttgacgagttggaaaaagacgccgcgattatattgtgccagacggagatgtatttcccccccgctttctatgacatcatgattcacttgattgtgcatctggtcagagaaatcaaatgatgctgcctgttcatctatt

SEQ ID NO: 18171 - DNA, 408 bp, Glycine max
agcttgccttgctccttgatatatttgagggactcatggtcactatgaatgacaaattccttgggataaaggtagtgttgccatgttttcaaagcccgtactaaggcatacaactccttatcataagttgaatagttaagggtaggaccacttaacttttcactaaaataagcaattggatggccttcttgcatcaacacagccccaatcccaacatttgaagcatcacactgaatttcaaaatatttttgaaagtttggcaacgcaagtatggggcattagttagcttttgcttaagaacattgaaagcttcttcttgtttctctccccatttgaaaccagcatttttcttgagcacttcattgagaggtgctgccaatgtgctaaaatccttcacaaatcgtctat

SEQ ID NO: 18172 - DNA, 417 bp, Glycine max
  unsure at all n locations
attcaaacgatgataactnnttactcggatgtctgatngagttccgcaatatatcgagacgctcgaaattgaatgttgaagctctgaccaaattcaaacgatgataactttttactcggatgtctgattgagtcccgtaatatatcgagacgctcgaaattgaatgttgaagctctcagcaaattcaaacgataataaatttttactcggatgtctgattaagtcccgtaatacatcgagacgctcgaaattgaatgttgaagctctcagcaaattcaaacgacaataatttttttagtcagatgtctgattgagacccgtaatatatcgagacgatcgaaattgaattctgaagctctgagctaattcaaacgacaataacgttntgctcggatgtctgattgagtcctgtaatct

SEQ ID NO: 18173 - DNA, 397 bp, Glycine max
tcaagcttgttggttgtcctcattactagaagaattatgagtagtcagcaattgaccttgctaaaattccagtctctcatggtcgctctaagcatattgaaattaagtttcatttcctaagagattagataaccaaaggaaaaatcaagttggttcactctaagacagaaaatcagttggcagatatcttcacaaaagccttgaagatagacagatttaaggagctgagaatcatgatgaatattctagagctttaggttattgtctgttgttggaatattgcattttgaatcatgggggtgttagaaataattcataaatgtaattacgggttaatgaaattatggattggtaagtacatataaataagtactcttatattgtaagaatagagtgt

SEQ ID NO: 18174 - DNA, 425 bp, Glycine max
gcaacatcagaccacttccagggtgctggaactacttttttggatttgttggggcctatgcaagttgaaagccttggaggaaagaggtatgcctatgttgttgtggatgatttctccagatttacctgagtaaactttatcagagagaaatcagaaacctttgaagtattcaaagagttgagtctaagacttcaaagagagaaagactgtgtcatcaagagaatcaggagtgaccatggcagagaatttgaaaacagcaggttcactgaattctgcacatctgaaggcatcactcatgagttctctgcagccattacacctcaacagaatgggatagttgagaggaaaaacaggaccttgcaagaggctgctcgggtcatgcttcatgccaaagaacttccctataatctctgggctgaagccat

SEQ ID NO: 18175 - DNA, 448 bp, Glycine max
  unsure at all n locations
tactcaagcttgaccctgctctgctgcggagtgggagaatggatatgtatatcttcatgtgttactgttcctttcccgcgctgaagattctgctgaagaattacttggggtgtgaagagtgtgagcttgaggagtccattttgaagcggctggaggaggttgtcgacgtggcccggatgactccggcggatataagcgaggttttgatcaagaacagacgcaagagagagaatgcggtggaggagttgttggagactntgaagctgagagcggagatgaatgaaaaaaatggagttctgagggtgaataatggggttgaagaggaggaagagcaagagaagagggctttagacagtgagagtcctaagcatgagtcagagattgaggacaattgcaaggaggaggaggaagaagaagagaagacaagtagtatatagtgacgaatgat

SEQ ID NO: 18176 - DNA, 402 bp, Glycine max
  unsure at all n locations
agcttgcttaatttggatttcttngagcgagaagttgaccttggaagtacttgtcaatgcgactgtaccatgctctcagtgcttgatttagtccataaaaagccttctttagcttgagaactttgtcttcttctaatttcacctttaatcccaacggttgttcgatgtacacttcttccacgaggactccattcacgaaggtagacttcacgtccatttgatgaattctccactagtgttgagttgcaagagagattattactacgatggtctccaggcgagcgaccagagcaaacacctcaacataattgataattgtgaaatttgagttaatttgatagtcaattatggctaagaatgattggaatttctttactttatcgtttatttaataaaataata

SEQ ID NO: 18177 - DNA, 437 bp, Glycine max
  unsure at all n locations
tactcacgcttgtaagagcttggtcacttcctttntcaccacatctagtatgacggngtttagtcgtttctgtggctacctcactggcttagctgcatcctctaaaagtatcctatgcatgcaggtagatgggctaataccaggaatgtctgctaaagtccatccaatggccttcttgtgcttcttgagcaccggcaacaacttctcctcttgctcaacatcaagggaagcagagatgatcactggaaatttgatgcaatcctaccccgcaagggcattggatagaagactccaagtagattgggccagagatccaagggaaggccctagggttctcatgagccttaaggtagattntgagcccatgggctaagtatgagcccgcttatctttgtaattattagaataggttttttccttcgtttaggccttgtatt

SEQ ID NO: 18178 - DNA, 392 bp, Glycine max
tcaagtgtttttaatgcatgtgaaattacaaaactacccataatacaaaaaactagtcaaagtgcccttaaatacaagggctaaaaaatcctacattactaaggtatccttcctacactatggagcactaaatacaagaccctaaaataatgaaattctaatctaatatgtacaaagataagtgggctcatacttagcccatgggcccaaaatctaccctaaggctcatgagaaccctatggccttctcttgcatctctggcacaatcttcttggagtcttctatccaatgcccttggggggataggattgcatcactaggggaaatctcaaatcaaaaagtgtcatgcttactatctatcaaagaaatcatatggtatggcatacaaatct

SEQ ID NO: 18179 - DNA, 384 bp, Glycine max
agcttgtatggttaaagtctcacgattgtcatgtgctcatgcaacaattgttagccatggctatacgagacatcttgccaaacaaagtcaggttagcgataactcgcctgtgttttttcttccatgctatatgtagcaaagtcattgatccagtcatgtttgatgagttggaaaatgaggcggcaattatattgtgccaattggagatgtattttccccctgctttctttgacataatgattcacttgattgtgcatctggtcagagaaatcaaatgttgtggtcctgtttatctacggtggatgtacccggttgagcgatacatgaagatcttaaaagggtatatcgtccagaagcatctattgttgagaggtacattgcaga

SEQ ID NO: 18180 - DNA, 378 bp, Glycine max
  unsure at all n locations
ntgcataccccaaggatcctttaagaaattacttgtgttatagagccatgagggtgggctcatgggccactttggaatagacaagacccttgtcttactcaaagaaaagttttattggccccatatgaagaaagatgtccataagcattgcactaggtgtgtggcttgtttacaagccaagtctagggtgatgcctcatgggctatacacacccttacccatcccatctgcaccttgggtagacattagtatggactttgtccttgggcttcctagaacccaaagaggtgtagactctatctttgtggtggtggataggtttagcaagatggcacactttatatccatgccacaggtggatgatgcttcccacatctc

SEQ ID NO: 18181 - DNA, 395 bp, Glycine max
tcaaccaagtggagatggttcatttcaagtgcttgaattattcaatgacaatgcttacaaagttgagctgcccggtgagtataatgttagttccaccttcaatgtctctgatttatctctttttgatgcagatggagaatccgatttgaggacaaatccttctcaagagggagagaatgatgaggacatgaccaagagcaagggcaaggatccagttgaaggacttggaggacctatgacaagggcaagagcaaggaaagccaaggaagctcttcaacaagtgctggccatactatttgaatacaagcccaagtttcaaggacaaaagtccaaggttgtgagttgtatcatggcccaaatggaggaggactaaatgacaccactttgtttcaatt

SEQ ID NO: 18182 - DNA, 346 bp, Glycine max
cttctcgatatatacgtaccagattcggacatccgagagttatgacctgaataatcgaattacaccagagcttccattgctcaatttggagagactagatgagttatgtacgcgaatctgacatccgcgtgaaaagacaggaccattgcgctttcacgagagcttgcgatgttcaagggcgagcgtctagatgagtcatgcacgcgactcgggcattcgtgggaaaagccatgaccattcaactatatcgacagctgccgttgtgcaaacgcgagcatctcgatatattatgttccccacttcagaggtccgagtgaaaagcaatgaccattctaaagatcgagag

SEQ ID NO: 18183 - DNA, 423 bp, Glycine max
tgaaagaatgcagacaatctggggttgtctgtagagaattactttgttgctatgagattaccttctctatgctcttcctatgtttataaatgaatcaagcagcctcaagatgtcaagaagtaaatgtggttgactgagaattacataaacaggttgggcttggttgccttgtatgttgttttgagcttcctagttgggggcctaaccttcttgaacaccaaagggaacttgatcttggagttgtggaactgcttggtgctctcccttttgcaaagtttagctgggatggtggcagttttgatgatctggatgcatggagacctgactctatgacgagatgccatttcgttgtacatgtgttcaacagcgccgtttagagtagtatcgcgatattccttgtacatgttgtgataaccagttcgg

SEQ ID NO: 18184 - DNA, 410 bp, Glycine max
tcatgcttaactatgtatggcaaaacttcattactgttgttcaagacatacaagtgagcttgtaacaaatcttctacactcggagtgatcacctgcagtcctctagaactataatcacccactctgtcatcataccgagacttacgaagcccaacaggtttagccttctctaagtattctgaacaaaattcaatggcttcttctgcaatgtacctctcaacaataaatgcttctagacgatatagattctttctatacccttttaagatcttcatgtatcgctcaaccgggtacatccaccgtagataaacaggaccacaacatttgatttctctgaccaggtgcacaatcaagtgaatcatgatgtcaaagaaagcacggggaaaatacatcttcaactggcacagtat

SEQ ID NO: 18185 - DNA, 386 bp, Glycine max
  unsure at all n locations
tcagctttatggctgttgacctaatccatacattttttaatattatgctctttttattctcttttgatatactttgtgctntaacgacttgaattcaatatgattttgtttatcaattatttttggatttgtacattacttatacgaaattttataagtttctttttttagttagtatttcactaggttttaaaataattaattaatcaaagacgtctttaagcaagctnttaaatatgctcgtgggccaagccagacttttatgtaagccgagccgagtctttaaaaaaagcctatgataggtaatgagccaagctcaagccttacgtattcaactcaagctgagctcaagcttagtaaagcttggtttggcttgctcatttcac

SEQ ID NO: 18186 - DNA, 388 bp, Glycine max
  unsure at all n locations
agcttgtgcactcaatatcctgatgagagtgttccatatgttctcaagactgaactaatacatttgctgcccaagattcatggtcttgcaggtgaagatcctcataagcatcttaaggagttccatattgtttgttccaccatgaagccccctgatgtccaagaagatcatatctttcttaaaggtttttcctcattctctggagggagtggcaaaagattggctctactaccttgctcccagatccattttcagttgggatgaccttaagagggtgttcttggagaaattcttccctgcatctatgaccactaccatcaganaagacatttcatgcatcangcaacttagtggagaaagcttgtatgagtactgggaaagattcaag

SEQ ID NO: 18187 - DNA, 381 bp, Glycine max
tctagcttataatattttattacgctcgaaattaaacaacggaaactctcgcgaagttcaaatagtcgtaactattcacacggatgtgcggttcgggcgcttaatatgtccagaggctcgaaattgagcaacgggagctcttgagaaactcaactgggataacttttcacacagatgcgccattgcccgcgatcacatatctagacgctcacaattgaacaacggaagctgcttgaaaagaaaatggtcataacgtttcacaccgatggccgatcaaggcataatatgtcataatctccatattccacaacatagatatctataagaaatggtctaattttcaacggatgtcgattaagcttatatatatgatacgctcga

SEQ ID NO: 18188 - DNA, 422 bp, Glycine max
  unsure at all n locations
tctaaactntgtacaagaatgaagctctgataccacttgttagacttgtggcctcagatatcttaagaagggggggttgaattaagatattccaaacttttctcctaattaaaaatctatcttactttttacttaagttatgaattcccttaatgacaatcttcttaaatattaattcaaatgaagcaacttgaattatgaatataaagcaataataaataaaggagattaagggaagagaaaatgcaaactcagttttatactggttcggccacacccttgtgcctacgtccagtccccaagcaacccgcttgagagttccactaacttgtaaattccttttacaagttctaaacacacaaggacaacccttcctttgtgttagagatttttaaacaagagactcacagctcttatccctt

SEQ ID NO: 18189 - DNA, 358 bp, Glycine max
tagaacaatggaagctgtcgagaaattcaatgtgtctatcttctttaacggatgttagactcggacacataatatatcgagacgctagaaattgaacgattgaactctctcgagaaattcaattggtcataacgtttcacacggatgtccgattcgggcgcattatatatcgtgacgttcgaaattgaacaatggaacctcttgagatatttaaatggtcataactgttcacacgaatgtccgattcacggacttaatatatcgagacgttcgaaattcaagaacggaagctttcgtgaaattcatatggaaataacttttcacatggatgatctagtcacgcggatcatatattgtg

SEQ ID NO: 18190 - DNA, 428 bp, Glycine max
  unsure at all n locations
gacctataaaactcagcttattggacaaaggcaaactctattgnnggatatgatggagaagcagnacttcttggacctgaaatgctacaacagattaacgaacaagtgaagttgattcgagagaagataaaagcatctcaggataggcagaagagctattatgatagaaggagaaagccactagattttcaggaaggagaacatgtgtttttgaagggttctcccgtaaccagagtcggaagagctctcaaggctaggaagttgacacccaagtatctaggcccgtatcagattttgaagaagattgggcttgtagcttatcatatcgccttacctccgagtttatcgaatttgcatcctgtgtttcatgtctctcaactgaggcggtacaacccagatccatcacatatacttacagtggacgccac

SEQ ID NO: 18191 - DNA, 371 bp, Glycine max
tatactccctttcgggtcacttagccccgaaaacattatgtattttgtgttgtattgcaaatcaccaagtagtgatcttggttgatgggagcagtacccacaacttcatacagaaacacttagtccaccaattgggcctaccaacacaaaccacaccttctctcaacgtcatggtgggtaacgggcatcacctggattgtcgccatgtctgtccagcacttgcagttcatattcaggacattgtcttcaatattgacctacatgtcctgctcctgtgtggtactcacatcgtattaagtgttcaatggttcaaatctctttggccggtgctaacggattataacgacttatccatgaagttctctcgcaac

SEQ ID NO: 18192 - DNA, 325 bp, Glycine max
tataaaactcagctttagtctaatttgaattctcgaatattatccgatgttatcggacatccaagtaaaaagatattggcatttgaatttcctatgagcttccgttttcaatttggagcatctcgatatattacaggactgaaccggacatccgtgtataaagttattggcatttcaattttctcagagcttccgatctaaattttgagcatctcgatatattacgggactcaatcagacatccgagtcaaaagttattgtcgttggaatttgatacgagcttacgcattcaatatggagcgtctctcgataaattatgacactc

SEQ ID NO: 18193 - DNA, 403 bp, Glycine max
  unsure at all n locations
agctttttgtttctactattccaataatttcctagtggccttatggaatctaaaataagtcttactatgacattggtgcaatggatttttatggtcatataaaaaacataacaaagatcaagaaaggaaatccaaaaaacatgtagaaactagcttgagccgcctttggtcaaagctgtagaaaatgcagaaactatgttgctcatcccttctggtggattactagtgagcctaaactagaaaagctggcctcatatgatgtttccataatatgtcttgtaattttggcttttgttatctttagttcttgttgtgtttaatgaagaaatattatgcatgaataacttctaggatggatattntatggattgcaccaatgttaagctttttgtttctactattc

SEQ ID NO: 18194 - DNA, 426 bp, Glycine max
actcagcttaacaccgaaatttagttaggctacttggtttctgtttttaaggaagatttagttgcttgtctatgaatatgttcctaataaaagccttgattgcttcatatttggtaagtttgaatatctgcgaaattagattgttagtatatgtctattaatttagttttggttcaagacacaccgagtactaatattggtttaacattcatatggttgtggtgtgtatgtatagatccaataaagaaaacacaattgaattggcaaaggcggtacaaaatcattgaaggtattgctcgaggcattctctacctccacgaggattctcgattacgaattatacatagagacctcaaagcaagtaacattctcttggacgaagagatgcatcctaagatatcagattttgggatcgcaagattggtc

SEQ ID NO: 18195 - DNA, 406 bp, Glycine max
tcaagaaaaagatggccttatcaaactccttattccttttggaattctatcaatagacctccaatctttaatggagagggttaccattactggaaaacccgaatgcaaatttttattgaggcaatagacctaaatatttgggaagccatagaaatagggccttatatacccaccacagtagaaagaattacaatagatggcagttcatcaagtgaaagtataactatagaaaaacctacagatagatggtctgaagaggatagaacacgagtacaatacaatttaaaagccaaaaacataataacatctgccctgcgaatggatgaatatttcatggattcaaattgtaagagtgctaacgatatgtgtgacactcttcggttaacacatgaaggaaactacaatg

SEQ ID NO: 18196 - DNA, 396 bp, Glycine max
ttcttggcattggagttgctttaaatcctagactttttcgaagcatcttaatctcagcttcttgggtctcctataaaaaaggtgaaaggttggtgtgattaaatggcaatatctgcaatttacatttcatcctacatatcaaatattatcaccttggtttttgcttgcaggttactctcctccacttccttagcatgaatcttttcctcaagcttagtgtagaactggccaccaaaataacatttttttaaaactgagtttatccaaaagaaaccctcatgtaacacaaaaggcagaagcaagtaataattatttacctcttttcttctctcagctcgctcatcacacttgaaactgaatccatattttggaagtgctcccaccctgcgaggtttg

SEQ ID NO: 18197 - DNA, 393 bp, Glycine max
agcttgtcatttaccagtaggaatggaacgcaaggcatactacgctaaaaaatttctgaattttgattgagttctgtctggagagaagaggaagttgcaactgttggagctccaagagatgaggcttaatgcttatgacacgatgttgtacaagcggattgtgaaggcctatcatgacatgaagttgttgcgaaagaacttccaatcaggccagcaagtcttgctctttaattcatgactcaagctatttccaggtcatctgatgtccttatgggctagacctctcactatctaagaggtatagccctatggagcagtggaattgatggatcctcagttacatcatctaaagagaacttgggtggtgaatggtcacagattgaaactgtatca

SEQ ID NO: 18198 - DNA, 392 bp, Glycine max
tgttttattggatcttatattcaagtggtcctctagtggagatggagttttagtaagtttctctgattttatggttatgagcttgctaatgcccttctattatccagtaatgttgctgttttacaatgcatgtggcagttggttgattacatggtttttatttttcaggaacgtgcggctggtgcattggctaatttggcagctgatgacaagtgtagtacagaggttgcactatcaggaggtgtacatgctctagtgatgcttgctcgtaactgcaaatttgagggagtgcaagagcaagtagcattactttttattatttgggtaccatccagttcagttgctaaaatctttgaagctgttttatttggtagatgatacctgccaattga

SEQ ID NO: 18199 - DNA, 404 bp, Glycine max
agctttttcaaattcaaacgacaataccttttgactcggatgtcggattgagtcacgtaatatctcgagacactcggaattgaataccgaagttatgagcaaattcaatcgacaataaatttttactcggatgtcggattgagtcacgtaatatatcgagacgctcgaaattgaataccgaagctctgagcaaattcaaacgacaataactttttactcggatgtccgattgagtcccgtaatatatcgagacgctcgaaattgaataccgaagctctgagcaaattgaaacgacaataaatttttacacggatgtcggattgagtcacgtaatatgtcgagacgctcgaaatagaataccgaagctctgagcaaattcaaacgacaatacctattgactcgga

SEQ ID NO: 18200 - DNA, 392 bp, Glycine max
agctttgcctcaaaacaaagtctttccaagacatccaaggctgtggtaatcgattaccaagcagtgtaatcgattaccagaagacaatattgaaaaaacaacttttaagaagggttttgaaatttgaatttaaaagttgtaatcgattaccattgatgtgtaatcgattaccaacaacgaaactcttgaaattcaatttgaaaagtcataacccttcaaaatataactgtgtaatcaattaccagaaacctataatcgattaccagtgaagaattttagaaaaagctttttgaaaagacacatctcttcaaaccattttgaaaaggcacgaatgcccaatatatatgtgtgtctgacttcagaaggcaagagagagatattctaagcgaact

SEQ ID NO: 18201 - DNA, 390 bp, Glycine max
tctatctttgtgcactaagcccaaaaacttctctggaatttcatcttttggagttgggtgatgcaatcctccctaggaagggaccactcactagagccatgagcaagaggctccaagaggattgggctagagctgctgaagaagaccctatggttctcatgaacctcagggtagatttctgagcccatgggccaaggctgggtccaattatctttgtacatattagactaggatgtcattatatttggtccttgtatttagggctccataatgtatgtagggtaccctagaaatatacgatttttcagcccttgtattttagggcacctacactagtttttatattaagcgtagctgtgtaatttcacatgcactaagtgaatatttgat

SEQ ID NO: 18202 - DNA, 404 bp, Glycine max
  unsure at all n locations
agctttgtccaactcanacgacaataacgtttttctcggatgtctgattgagtcccgtaacatatcgagacgctcgacattgaacgttgaagctctgagccaatacaaacgaccataacttttttctcagatgtctgattgagtcccgtaacatatcgagacgctcgaaattgaatgttgaatctctgagaaaattcaaacgacattaaatttttactcgaatgtctgattgagccccgtaacatatcgagacactcgaaattgaatgttgaacctctgtgcaaattcaaacgacaataacttttttctcggatgtctgattgagtcccgtaacatatcgagacgctcgaaattgaacgttgaagctctgagccaatacaaacgaccataactttntactcgga

SEQ ID NO: 18203 - DNA, 399 bp, Glycine max
  unsure at all n locations
agcttgtgaagctcctgttttagctttacccgattntactcaaccatttgaagttgaatgtgatgctagtggagttggcattggggctgttttgatacaaaacaaaaggcctatagcttatttctcggagaaattgggaggagccagattgaactattgcacctatgacaaagagttctatgccattgtgagagctcttgatcattggaatcattatttgcgttctaatcactttatattgcattcagatcatgagtcattgaagtatatcaatgggcagcagaagttgagtccaaggcatgctaaatgggttgaatttcttcaatcttttaatttctcttcaaaatacaaggatggtaagagtaatgtggtggctgatgcactctcaaggaggtatgc

SEQ ID NO: 18204 - DNA, 393 bp, Glycine max
agcttactttattaagttctctaaaagtgactgaggaacttggtgtctcaataaaaaacaatgcttcttggcagtccatggagatgcaccacttccttgaaaaataggtcaacaacatggcaagcatcatcaatcttcttgcaaggtataaaatgcgccctctttgaaaacctgtaatccacaacaaaaatggaatccttgtcatttcttgtatgtgggaatcctaaaacaaagcccatagacaaatctatccaaggacaatcaggaataggcaaaggagaataaagtccatgatgcttgatgttagacttagagttcttacaaacaatgaaattctcaaaatttttttttacatcatgtttcatatgaagccaaaagaaatgctcatgcagc

SEQ ID NO: 18205 - DNA, 393 bp, Glycine max
agcttgttatctcaacctatcacataatattcttgaaggggagctgaacttgactggattgataggcttgcgcacattagacttgtcaaataacagattttatggggatattgggttgaatttcccttccatttgtgccaatttagtcgttgcgaatgtctcaggtaataaattgactggtgtgattgaaaactgctttgatcaatgtctcaagttgcagtacttggatttgagcaccaacaatctgagtggaagcatatggatgaagttttcgaggctcaaagagttttctgttgcggagaaccatctaaatgggactattcctttggaagcttttcctttgaattgtagccttcaagaactagacctttcacaaaatggatttgctggtga

SEQ ID NO: 18206 - DNA, 392 bp, Glycine max
tttcttatttactctgaaagcaaggctgtgatgatggcatgggagaatccgttgatggaggctcatgctaaggcggtttgttccggtggtggccacgtactcaatattgggtttggtatggggctcgaggattcggccattcagcgatatgcacctgcttcacacaccattgttgaggctcatcctgaggtttatgaacgcatgcttcgctccggttggggccacaatgaaaatgtcaagattgattttggacgatggcaagatgttctgcctgagcttgaaacatatgatggtaattgctattcgtctaatctttatcttcataaacgtcaatgcttgattgcatcattacacatactattacaatcgattggatattcttctctgaaaaa

SEQ ID NO: 18207 - DNA, 393 bp, Glycine max
ctatctgtgatttggagcggtataaggctcgtcttgttgtcaatggcaggtcttaataggtgggtatcgactatgacgagactttcagtccagtggtaaaaccagctactatttgtgtggtactaagcattgtcgtgtcaaagaattggaccattcatcaacttaatgtaaagaatgcttttctctataggcacctttctgaaaccgtctacatgcatcagcctcctggatttcgtgatcgaaatcatccggatcatgtctgtcttctaaagaaatccctatatggccttaaacaagccccaagagcatggtaccaacggtttgcatcttttctctccaccatcggatttgttaatagcaagaccgaccactctctgtttatctatactcatg

SEQ ID NO: 18208 - DNA, 388 bp, Glycine max
agctttgtgtgtgattcacgaaagatgatggagaattggactaatgatggaatgtgctacaacatttaatatattagttggggatggatgggtgccaattcatctaaattgatcctaatccaaagatacttgcatgtgctatatgaacgaggtttcatcttatgaattgcatgcgaagcttttgccacgtacagtgtgaaataacattctgtattctgtcctcacgtatataacaaggctacatattgtgaacaccctcgaagcatttgagactaactcttatagagaaaaaaaaatggctgatacacgtggatgagatgcagtgagaccattggtgatatgtgataacaagtgtggctgcacacttacatgcactggtggattcact

SEQ ID NO: 18209 - DNA, 327 bp, Glycine max
agctttctttgttcaatttcgagcgtctggatatattatccgcatgaatcgaatttccgcgtgacaaggtttgaccatttgaatctctagagagctatcgctgtctcaatttcaagcgtgtcaatatagtatgcgcctagtttggacttttgggtgacaagttatgaccattagaatcttccgagagcattcgatgctcaattgcgagcgtttacgcgtattatgcgcactgaatcgactttcccgtgacaagtattgaccattcctattggtagagagcatctggatttctagatagaacgtctggatgtgtgatgcgccagaatc

SEQ ID NO: 18210 - DNA, 391 bp, Glycine max
tgcttgctaacccatggaagctcctaatatctcccacactttttggggtgggccattcttggatggccttgattttctcaaggtccacttggaccccatttctaccaactacaaaacctaagaaaactatattatctacacaaaaggtacacttctctatatttgcatagagggtgtttttcctaaggactgaaagaacttgtctgagatgtcctaagtgatcatctaggctcctactatacactaaaatatcatcaaaataaacaactacaaatctacctatgaaatcccttaagacatgatgcataagcctcataaaggtgcttggtgcattagtgagcccaaaaggcatcactagccattcatacaaaccaaacttggtcttgaaagc

SEQ ID NO: 18211 - DNA, 400 bp, Glycine max
agcttctgatttcaatgtcgagcctcacgatatactacgagacaaaatcggacatccgagtaaaaagttatgaaattctgataccaggggacagatgtcgtaccggatgtcacgacatcacgcttcagaacatgcagattatatgtgtccgtatgaacagattaaacaagtaaataacacaagagaattgtttacccagttcggtgcaacctcacctacatctgggggcttccaagccagggaggaaatccactctcaatagtgttagttcaaggtctaacagcccctgtttacaaccttctcacctaaccactacccgtgcgatctctacctaagagccactcttagatatgagaacctctgctcactccctctcactcacactcccgtgtttacaatc

SEQ ID NO: 18212 - DNA, 397 bp, Glycine max
agctttttagtaaattcaaatggtcataagttttcacacgaatgttcgattcggggacataactcatctagacgcctgaaattgaacaacggaagctctcgagaaattcgaatgctcataagttttcacacggatgtccgattcggggacataatatatcgagatgctcgaaattgaacaacggaagctctcgagaaattcgaatggtcaccacatttcactcggatgcccgattcgggaacataatatatcgagacgctcgaaattgaacaacggaagctctcgagaaattcgaatggtcataagttttcactcgaatgttcgattcggtgacataactcatctagacgctcgaaattgaacaacagaagctctcgagaaattcgaatggtcatac

SEQ ID NO: 18213 - DNA, 388 bp, Glycine max
tgcttcttcttcaatgaaaccgtttaaaaaggcactcttaacatccttttgaaaaagcttaatgtttttgtgagcaacaaaggctaaaatgattcttataacttcaagtctagcaacatgaacaaaggtttcagagaaatctataactttttgttgattatatcctcaagctactaacctagctttgttgcatactacttttccttgttcatccaacttgtttctgaagattcatcttgttccaatggtgctcttagtttctggcattggaacaaatgtccagacatcatttttgttaaactgattcagtttttcttccattgagattatttagtcattatctatcaaagctttgtctataagtttaggtttgatttcaaacacatgg

SEQ ID NO: 18214 - DNA, 393 bp, Glycine max
ttctatatccacaaacataatccaatatccagaagactttgatagggaagttagaatcctcgggaaagcaaggcacccaaatctaatagcattgaaaggatactattggactcctcaactacaacttttagtaactgagtttgcaccaaatggtagcttgcaagccaagctacatgaaaggcttccttcaagtcctcctctttcttgggctataaggttcaaaatcttgcttggaacagcaaaggggcttgctcatttgcaccactctttccgtccaccgatcatccactacaacatatagccaagtaacattttgcttgacgaaaattacaacgccaagatctcagattttgggttggctcggcttctgacaaagctggaccggcatgtgat

SEQ ID NO: 18215 - DNA, 386 bp, Glycine max
tagcttggacaacaaaatttgacaactaatagaattatataaataagaaataaaaatgtaggataaaatcaaatttatattctttacttatattcttcttcctatttatttatgctaaattgcattgaaagtgaaatatatacaatattataattataataagaattcagaaaatataatttggtggagtaaaactgtagagtatttaattttaaataataaatttattaatgcacaaaaaagaaaaacatgttggcttttaacaattgtgcaactctttttatgttaggtttataattgtaatttttagagcacaatcttaattatgatttataaatatttctggaatattaatattcagggtatcaaaaaagaaagatatgttc

SEQ ID NO: 18216 - DNA, 361 bp, Glycine max
agcttgaccaggaattatttgttgggttggatgttgaattctggttgttcctgctgcggagatgatggtacagagggtgaaccatgagctgaagcttcttttggtgaggtagccatggaaaagcatagcgtttggaatgattccgtaaatttctgagagctgctggggaatgcagaaaacgagattaacacgaaaatataagtttgaatgatgaatgtacagggacgtgtgaagcaacggtcgaatctgctttggttcagtatgtgaacgtgctattaatgttaagtgattcctttgggcacgttcagatatcagtatttgctacaattgctctagcagacaaattgcccatttgcccctc

SEQ ID NO: 18217 - DNA, 432 bp, Glycine max
  unsure at all n locations
tagctacacacacccctctaataactaagctcaccttcttgagaatcttccttaanaagattcctaaagaagctagagcttagctacacacacctctctaatagctaagctcacctccttaagatgagaagctagaactgtgctacacaccccctataatggctaagctcacccccatgacaaaatacatgaaaatacaaaaaaagtccctactacaaagactactcaaaatgcctcgaaatacaaggctaaaatcctatactactagaatggccaaaatacaaggcctaaacgaaggaaaaaacctattctaatatttacaaagataagcgggctcatacttagcccatgggctcaaaatctaccctaaggctcatgagaaccctagggccttcccttggatctctggcccaatctacttggagtcttcta

SEQ ID NO: 18218 - DNA, 386 bp, Glycine max
agcttgataatacatttttcaaaatcaaaagttattttatatcctttatcacacaattgactaatacttaatagactatgctttaaaccttctacaagtaacacattttcaatgggagtagaggaactcgtacctattttgctgactccaatgattttgcctttgttgttgtcaccatatgtaacatgtccacttttcttgggggaaatggttgtgaatttggatacatctcctgtcatatgtacggaagatgaagacgtacacacgatttatactggttcggccacaaaccgtgcctacattcagtccccaagcaacctgcgagtcttgagatgtctatcaaccttggaaaatcctttacaagccatagatccacaagggatgta

SEQ ID NO: 18219 - DNA, 404 bp, Glycine max
  unsure at all n locations
tatgtgcgactctgatgatgaatcagaagccgtttatgctcggtatatgcngtgccgcanagataatgttgagactagcacttggctagaaggaatttacaaaatgaaagaaaaatgggctagttgctatatgatagatgcttatagtataagaatgccaagtactcatcttagtgaaagtttcaatgctagtgtgaaagattatgtcagatcaagctcgcatataatgcacattttcaaacattatgagcgagctgtggatggcaagcaatacaatgaattagatgctgaatacaatagcaggaaaaaacttcatcggctaatgatagaacactcaccattattaaagcaggttacgcaactttacactccaataatgttaaattccgttcagaatgaatatg

SEQ ID NO: 18220 - DNA, 314 bp, Glycine max
agcttgaatcggacatccgtgtgaaaagttatgaccatttgaatttctcaagagcttccgttgttcaatttcgaacctctcgacatattatgcacccgaatcggacatctgtgtgaaaagtcatgatcatttgaatttctcgagagctttcgatgtttaatttcgagcgtatcgatatattataaccctgaatcggacctcagtgtgaaaagttatgaccatttgaatgtgacgagagctttcgttgatcaatttcgagtatcactcgatgtgacgcgccttaatcggacattcgagtgtaatgttatgaccat

SEQ ID NO: 18221 - DNA, 385 bp, Glycine max
agcttcaagaataatgtgcctcagcaaacttcttattcccagaaggaaattcaatagatatgcctcttatttttaatggagagggttaccactactggaaaacctgaatgcaaattttcattgaggcaatagacttaaacatttgggaagccatagaagttagaccttatgtacccaccttggtggctggaaatacaacaatagagaaacctagaaaagagtggtctgaagaagaaagaagattagtgcagtacaatttaaaggctaaaaatatcattacttctgccctaggaatggatgaatattttagggtgtcaaattgtaagagtgctaaggatataagggacactctacaagttacacataatggaacaactgatgtcaa

SEQ ID NO: 18222 - DNA, 380 bp, Glycine max
attttccttagagaggtttggtgctccgtgtaggaagagatggttttgagaagagagaaagaaaaaataaattcacgaggatgaataatcgaaaaagctatttatatctaaggtattcacaacctattatttactctattgatttattgctattatttaatacaaacattatattttattccctattcaataaataaataaaatattttttgtattttctcgaaccattattctaattaataatttttttatctatttaattataaaatctcattatcttttcaaatctctatttattttcgaataacaatcattgttaaatcagtttataagaaaaatgaaatgttacacatgtaaatgccaatatcaatataactatg

SEQ ID NO: 18223 - DNA, 334 bp, Glycine max
tctacattcaattccgagctttgcgatatattactgtattcaattggacatccgagtcacaagttattgtagtttgaatctgctcagggctgcgggattccatttcgagcgtctcgatatattacgggactcaatcggacatcagagttaaaagttattgatgctagaatttgctcagagcttgggtattccatttccagcctctcgatatatgacgggactcaatcacacatccgactgaaaagttattgacccctcaatatgctcagaggttcggcatgccattctgagcgtctcgaggtattacaggactcaatcttacctccgagtaaaa

SEQ ID NO: 18224 - DNA, 372 bp, Glycine max
atctttcttaagaagatttctaaagaagctagagcttagctacacatacctctctaatagctaagctcacctccttgagatgagaagctagagcttagctacacaccccctataatagctaagctcacccccatgacaaaaaacatgaaaataacaaaaaaagtccttattacaaagactactcaaaatgccccgaaatacaaggttaaaaccctatacgactagaatggccaaaatacaaggcccagacgaaggaaaaacctattctaatatttacaaagataagcgggctcatacttagcccatgggctcgaaatctaccctaaggctcatgagaaccctagggccttcccttggatctctagcccaatc

SEQ ID NO: 18225 - DNA, 319 bp, Glycine max
actcaagctggaccccacggaagctgctaatatttcccacacttttggaggcgggccaatcctggatggccaagaattactcatggtccacctgtaccgcatttataccaactaccaaacctaagaaaactataatatctacacacaatgtacacttacctatatatgcacatatggcgttattcctaatgactgagagaactagactgagatagcctaagggaacatgaaggctcctactgtacactgaaatatcctctagacaacctactgcggatctagttatgagatcccataagacatgatgcataagcctcat

SEQ ID NO: 18226 - DNA, 361 bp, Glycine max
agcttcaacatcagactccttccagggtgctggaactacttcacatggacttgatggggcctatgcaagttgaaagccttggaggaaagaggtatgcctatgttgttgtggatgatttctccagatttacctgggtcaactttatcagagagaaatcagacacctttgaagtattcaaagagttgagtctaagacttcaaagagaaaaagactgtgtcatcaagagaattaggagtgaccatggcagagagtttgaaaacagcaagtttactgaattctgcacatctgaaggcatcactcatgagttctctgcagccattacaccacaacaaaatggcatagttgaaaggaaaaacaggac

SEQ ID NO: 18227 - DNA, 407 bp, Glycine max
  unsure at all n locations
tgtgtcgcactggctactgcggaagttaaacatatttctgcagttagctgangagctcaaagactctggatgaagcatcaacttgaagactttggagtaaaccttgatcacattcctctaaaatgtgacaacacaagtgcgatcaacctacaaaaaaaccttgtcatgcattctaggactaaacacatagagataaggcattattttcttagaaatcatgtgttaaaaggtgattgttgtattgagttcattgatagtgagcatcaactagcagatattgtcactatacctcttgctagagataggttctttttcattagaaatgaactaagcatattagatgcatctagcatagaatgatattctgtttgcacagtgtgtgtgattgacattgctactcatataat

SEQ ID NO: 18228 - DNA, 429 bp, Glycine max
ctccacaacacctataaagtagggttgccaagccaacaatcattcagtctatatggtcctgggccctaatcttataatgaactttacaagatgatcggacaatggttgaaaaagttcctatccaataccacaagcaagctccctttccatgtgtcaacccattcccttgaagtcaaacgtctatctaatacactcatggtcttaccatttggatgaaaccatgtgaattttctccccacaaatggaatatctaccatattcatatccaagataaattcattaaactctctattatgccccccatgaggatgtgtattatcactttttctttgatgcataccacatacactattaaaatctccaatagggcaccaatgatcaatgctactcccactccttctacctatgagttcctaccacattcttctt

SEQ ID NO: 18229 - DNA, 376 bp, Glycine max
  unsure at all n locations
agcttctttntgttggcagttaaggaactagtgaagcatagacaaccaaatactcttaaagaactaatatcatagggggttccatagagtttctcatagggagttttgttaccaagaaaagtagtaggtatgcagttaacaagaataccaaagtgaattaaagcataagaccaacaaatgaaaggtaaattagattgaaacaacaaggatctagtaacattaagcaagtgttgatgctttctttctacaattccattttgttgaggtgtttcaacgcaggaagtttggtgtataattccaatttcatcatagaattgtcttagaatgaattctgatccattgtctgatctaatcattttcacctttatatcaaact

SEQ ID NO: 18230 - DNA, 438 bp, Glycine max
  unsure at all n locations
ctagcatcaatgacagaccatttttaataaatgagtgatttgctcnaattcatgcttttatactatcatgtatatacccccaaaattattagagtgtggcaacaatgtctttgatagtacaaagtcaacaatatagataatatgtaaataaatatgttgtctacaaaaatcaatgctacgaagacatgtgtaaatgactcttgagaacatcacatataaatagagatattctaacatatttttatttatttatttaagtgtaaataaaggagaaaagaaataaataagataaaaatattatttttggtccgtctacacacaaaaacaaaaaaaattcccataatttattactaagaaagacatgtaggttgngattattattctttcttctattttaaaaattaaataattctgtaaaaatataaacattaaataatt

SEQ ID NO: 18231 - DNA, 363 bp, Glycine max
agcttgccatgaattggttcatgtgtactagtaaagaggctggcataatcctgtcataaaacacaaccataaactaaaataagcatatgtgatcagtgtcaaaataaaatgcaaccatttacaaaaccaatcaagaaaataagaatagattattacagctaaccaatcaacaagcctttcaagtagccatgcttgagattgcttgtccacataaaatatttcaattaactcccacgcagctttcaaagatgtaggctcttcacctctctatattatgtgtaatgtgttaaaaagcaagtgattaacttctcggtatcataattcccacaaagcagatctcagctcagctaaacacggtaaaac

SEQ ID NO: 18232 - DNA, 370 bp, Glycine max
  unsure at all n locations
gcgattcactcgtcccgggatcttagagtcactgtatgctgcaagcttctacattcaatttcgagcgtctcgatatgttaccggacccaatgagacatcccagtaaaaagttattgtcgtttgaattggctgaaatctttaacaattaatttccagcgtctcgatatgttacggtacttcatcagacattcgagtaaaaagttattgtcgtttgaattaactcagagcttcaacattcaatntcgagcgtctcgatatattacgagcctcaatcagacatccgagtaaaaagttattgtcgtttgaactagctcagagattcaacattgaatttcgagcctctcgatatattacgagactcaatcagaca

SEQ ID NO: 18233 - DNA, 416 bp, Glycine max
  unsure at all n locations
ctcagcttgagccattcnacaacataacttttactcattgtctgattgagtcccgtaacatatcgagacgctcgagattgaatgttgaacttttgagctaattcaaacgacaataacatttttctcggatgtctggttgagtcccgtagcatatcgagacgctcgaaattgaatgttgaacctcttagctaattcaaacgacaataacttttttcacggatgtctgatagagtcccgtaacatatcgagacgctcgaaattgaatgttgaagctctgagccaattcaaacaacaataacttttttctcggatgtctgattgagtcccgtaacatattgagacgctcgaaattgaatgttgaaactctgagccaattcacacaacaataactttgtactcggatgtctgattgagtc

SEQ ID NO: 18234 - DNA, 410 bp, Glycine max
tgttcaccccatgtcgaatgcgcttttttagagcttttcatagtaccactaattgttctccttatgaagatgagcatgggtttaacccactaactcctcttgacctttcgcctaatgctgctgtttataaccataaagaacgtcaagcaaaggcggactatgagaaaaagcttcatgagagagtcacagatcaaattgagaggaaaagtaacagctatgctaaacaagccaacaaagggagaaagatggttgtcttctaacccggagattgcgcacgggtgcacatgagataagaaacgtttcctgaacagaggaaatcaaagcttcaaccaaggcgagatggaccatttcaagtgctcgacagaatcaatgacaatgcttacaaaattgagctgcccggtgagtataat

SEQ ID NO: 18235 - DNA, 348 bp, Glycine max
  unsure at all n locations
atctttaactcggatgtccgattcaggcgcataatatatcgagacacttgatattgaataacagaagctctcgagaaattcgaatggtcataacttttcacacggatgtccgattcgggcgcataatatgtcgagacgctcgaaattgaacaacggaagctctcgagaaatcctaatggccataacttttcactcggaggaccgattcatgcgcataatatatctagacgctcgaaattgaaaaacggaagctcccgagaaattcaaatggtcataanctttaactcagaggtccgattcatgcgcataatatatcgagacgctcgaatatgaacactcgaagctctc

SEQ ID NO: 18236 - DNA, 416 bp, Glycine max
actcagctgtagcaaatgcaactgtatacgttttactctttgttcgattgagtcacgtaatacatcgaaacgctcgaaattgaaaacagaagctctgtgcaaattcaaacgacaatacattttaactcggatgtccgattgagtcccgtaatatatcaagacactcgaaattgagaataaaagctctgaacaaattcaaacgacaataactttttactcggatgtgcgattgagtccagtaatatatctagacactcgaaattgagaatagaagagctgagcaaattcaaacgacaataactttttactcggatgtccgatggagtcccgagcgtctcgatatattatgcgcctaagttggacatccgagtgagaagtcatgacaattataattgctcgaaagcttacattgttca

SEQ ID NO: 18237 - DNA, 368 bp, Glycine max
agcttttaaatattattatgttttacgtaattatttttttagtcccgaaaaaaactattgttattaatccctcaatttgtggcgatttgtcaagtcaaaaatattttttaatggaatttctctaaagataattagttggctatttaaaatagtcgtaatatgtaaaagattacgataattctatatcaattatgtatttttcttctttaaaccaatagatatgtaaaaaatgattatcaaaccattcgagtcaaatattttagtggattagaatcgctaaaaatcatttttaaaaaaatttatgataatggtgatggttaaaaatcattataaatcgtgaaactataaataaattatataaagagaga

SEQ ID NO: 18238 - DNA, 430 bp, Glycine max
  unsure at all n locations
tcacaaaagtttatatgacttganacaagcaccgagtcagtnggactagaagnntaatgagtttatgagcaactcaggattcagaagatgtgacatggaccattgctgctatgttaagaaatatactaatagttatgttattcttgtcgagtatgttaatgacatgtcgattgcaggatctagtatggcaaaaattaacaagttgaagcagcagttggcagaaaactttgaaatgaaggatcttggtccagctaaacaaatccttggtatgagaattcttanaaatagataagaaggaatcttgaagccgtctcaggagatatatatacacaaattgcttgacaggttttaccttggagattctaagaccaggaatgccctttcgggatctcatttgaagtttcaaagaagcaatctatgcagacagatg

SEQ ID NO: 18239 - DNA, 427 bp, Glycine max
  unsure at all n locations
tactccacaatgttctccanaaatgtttttggaacttggtatccctatcacttattatgctcatgcacagtccatagagtgtcaccacctccttgtaaaataagtcagcgacatggaaagcatcatcaacctttttgcaaggtataaaatgagtcatttttgaaaacttgtcaataaccacaaaaacaaaatctttgccactctttgttctaggcaatcccaaaacaaagttcatagatatgtcaatccaaggaaaattaggaacaagcaaaggatgatataaattaagtggcttcacttttgattnttcctttttacaaacaatgcattgttcatagtatttatgcacatcacgtttcatatggggataataaaatgctcatgcaatgtttcttaagtcttttgcatgccaaaatgccccatcaaa

SEQ ID NO: 18240 - DNA, 285 bp, Glycine max
acccagtccccctcattaagaactagctcctttcttcctctattgcccttagttaaatacacctttgcttggatctctatttgggtcttaaccctctcatgcaacttctttacaaactctgacctagattccccttctttatgtataaaagaagtgtcaagagggatgggaatgaggtctaccggtgttaagggattgaacccatagacaacctcaaaaggggattgcttggtggttctatgaacccctctattgtaggcaaattctacatgaggaagatactca

SEQ ID NO: 18241 - DNA, 364 bp, Glycine max
tttgcaagtttgttcattccgaagagaaaaaaaatagagttgtcataggataaaaatgaattctttatagttggagtaaaacgggaattgaataaattaaatgattaattattgttttttcttgtaagaattaatgtctcatgtgataggcatatgacttatgtagagaataataagtaaataattaacgattaagggctaaattgtaattgggcttaatatgagaagtatctagagctaactgctacttgatgggagtagtgattataaatgggggataatacccactaacgttaaataaggtccccttcctgactagaaagtgtgctctctcacctatagtcattacgaacggagagagaca

SEQ ID NO: 18242 - DNA, 385 bp, Glycine max
  unsure at all n locations
tttcaagttttaacctttaaacaaactaactaatatataatttcaaattttaatgataaaaatctaatacaacaacaattaaactaatataggttatattgttactcatttaatatgaaaatatattagatataaaatgtttttcaaactaactaaataaaagagtggatgcatgtgtaggttaatagcctataactaaaacctttataacataacatttgtttttctcgagaaaacatctcacttgttttaaggtgttgctacgtgtaccaatcatattacttgtgcacccagcacaaaaaatttaatttcgaaaatgctcttattngctttttcttccctttaagtttcnttttttacaataacacagtcattctttcatttt

SEQ ID NO: 18243 - DNA, 416 bp, Glycine max
tagtgacaaaaatcctctaataccaaaatccatggtttgtgaaacattggtcggatgaagaacaacatcttatggactccccttggccattcgttgtttagggaatggatattctcggaaatttacccatggctccaatgcaaaggaaattcctgctagtggcagatgattatttcacaaaatgggtcgaggtcgaaccattagcaaacataacaacctatgccatccaaaaattcttttggaagaatatcattacacgctttagaatttcaaacacattggtaaaaaaaatggtttacaattcacagaatgaatgctcaatgagttcttaagcagcctcgaaatcaaacattgggtgacgtttgtagaacacccccaaaccaattatcaatctaaagcagccaacaagataattc

SEQ ID NO: 18244 - DNA, 365 bp, Glycine max
agtttggaaactctttggcaagatacatccagattttcccattgacccgcggaatgtgcgacttggtttatgcatagatggatttatatacaatcattatcttcaccttatttggcttggtcaatcattgttaccccatacaatcttcctccagaaatgtgtatgactaaaccttatatgtgtatcaagactaaaccttatatattcaaagttcaatgagcaatttaggaaacatggatttgaacatgatgcatctatggtgagaaattcaattctagcaaatccaccaaaccgtttagtcaaatttctacttaagagccatcaaactttaatcaggagagaaaaatatagagagagactttatt

SEQ ID NO: 18245 - DNA, 386 bp, Glycine max
  unsure at all n locations
agcttttcctttattgttctactagagattccaagtgttagagaaaagaagaagggattggagcctcaatttcactgtctttgtgtgagggtaatttctctctctatagacattatttgcaaatcccaactgtgagaatgtgaggaaataagttctgaagttgatgtcccaatttcagaacaatcgaacggttaacgagtctgggatcataattntactgggataggtttgggtgtatgcgggaaaaagagagggttatggaagataaagaagggagaatgaatttgaaagacaggaagagcatagagacacatcgtaattgtgaaaactaacctaatatgtatctatttatagctaggatacttttagcctattacttactctat

SEQ ID NO: 18246 - DNA, 383 bp, Glycine max
agtttgagaatggagaattgcacaaagcaatcactacgcatggctccaaagtcgaaggtttaaaacacatgaacgaaaacgcaattcatggggctccgaaaaaggggttacaatggagaattgcactaatcaatcactacgcatggctccaaactcgaaggtggaggacacatgaacgaaaacgcaattcatggggctccgaaaaaggggttgagaatggagaattgcactaagcaatcactacgcatggctccaaactcgaaggtggaggacgcatgaacgaaaactcaattcatggggctccgaaaaagggtgagaatggagaattgcactaagaaatcactacgcaaagtttcaaactcgaaggtggaggacacatgaac

SEQ ID NO: 18247 - DNA, 384 bp, Glycine max
  unsure at all n locations
accttcggcttgcaagtttgtaggcgtnggatcttcttcatcaatggagtcatttgcttcttgaagatcatggcagcggaatagagaaggaagaaagatgattggagaccccactctaggagatgatgagtcaagaagaagctcaccaccacaggaagccatggataagagcttgaaggaaggcgaatatgagtggagggagagggagagaatgggcacgatattttatgcctcanatgaggtctgaactttgaagtgtaattctcaaatgatcaaagttcaaaaaatgcacacacatggcctctatttatagcctaagtgtcacacataattggagagaaatttgaatttctattcaaattcactcgaatttgaaattgaatt

SEQ ID NO: 18248 - DNA, 392 bp, Glycine max
  unsure at all n locations
agtttaagctctcttaactgcataaggctcttaatatttgaagagtatccttgtggaaccttcacccgacgaagacactgacaaaaagttatcttctcctttttggacaaagtatgaaagctaggggcaagtaaattttcttcccatcagaccttggatgcaactgtgatcgtatccccatctcaactagatcttgacgggtattcaagccatccttcgtcttgccctanatgttaaggagcgtcccaatcacactgtcacatacatttttctcgacatgcataacattaatacaatgtctaacgtctagatcagaccagtatggaagataaaagaaaatgaacctctttcttcatatgcaagtcttacttttattcttcttttgggtcttt

SEQ ID NO: 18249 - DNA, 386 bp, Glycine max
  unsure at all n locations
agtttaagcttttntaactgcataaggctcttaatatttgaagagtatccttgtggaaccttcacccgacgaagacactgacaaaaagttatcttctcctttttggacaaagtatgacagctaggggcaagntaaatttcttcccatcagaccttggatgcaactgtgatcgtatccccatctcaactagatcttgacgggtattcaagccatccttcgtcttgccctaaatgttaaggagcgtcccaatcacactgtcacatacattnttctcgacatgcataacattaatacaatgtctaacgtctagatcagaccagtatggaagataaaagaaaatgaacctcttcnttcatatgcaagtcttaactttattcttcttttgg

SEQ ID NO: 18250 - DNA, 438 bp, Glycine max
  unsure at all n locations
tgtagaagcaaaaggccagctatggttttcaaggtgtattttgaaaaggcctatgactcagtctcatgggcttttttggattatatgctacaaagaatgggtttttgtcccaaatggagacactggatttctgcctgtcttaattcagcaagcatttctaaaagatgtccaggtttaattctctgatttgacgctagtcaacaaattgtttctgacaagtcatcaagctaccaagcttgtaaggattctaccgaaatcattgtgattgaaaggaaaagataatagaaagtaaatatgatgctaggataacaaatggttgtcattntgagatgattaatacactggcttagtacttcaatttattctttagaaccaataaggagactgagtatttaaagtaaaaatatagaggacttccatantttggaaacatgaatg

SEQ ID NO: 18251 - DNA, 429 bp, Glycine max
tatgctgcatacatttataatagaccccctcttctttaaaaccaacaacagcagaataatgatgatctttcaagcaacagatacaatccaggttggataaatcatccaaatctgagatgggtaagtcctccacaacaacaacagcctgtccctcccttccagaatgttgctggtccaagcaagccatatgttcctcctccaatatagcagcaacaacaacaaagacaacaagcaactgaggctcctcctcaaccttccttagaagagttagtgagtcaaatgaccatccagaatatgaaatttcagtaagagacaagagcctccattcagagtctgacaaatcagataaggcagaatgctactcagttgaaccaagctcagtccaaaattcttacacattgccttcacatactgtgtagaatctgaaaa

SEQ ID NO: 18252 - DNA, 374 bp, Glycine max
  unsure at all n locations
agtttctgagttgtttttggattgnacatttcaatacttggtaaaatgtgataatgggctttaataaatcatttgggagtgatatttaattattgtaaattattggccgagtggtctacctagagggagatcccaataattctagtgatgatttgtggaattaacttgctgtatgatgccattcaattgtgaacatgagttgataattgtgaaattgggtccagagggattgaccctgatgtaagctccattggagcttgtaggcctaagatcttcctcatcaatggattcctttgcttcttggaagatgaatggcagcggaatggagaaggaagagagagaggagatgccactttaaggagaagatgagtcta

SEQ ID NO: 18253 - DNA, 437 bp, Glycine max
  unsure at all n locations
nttaactgaatttgcaatgttccaattgttttttaattggtgtaatcgattacaatatattggtaatcgattaccagtgtatctaaacgttgaaattcaaattcaattgtgaagagtcacatcttttcataaaatgctttgtgtaatcgattacatggttttggtaatcgattgccagtgacaagttttgaataaaaatcaagagatgtaactcttccaatgcttttctcaggattttctcaaggttataactcttccagtgattttcttgaccagacatgaagagtctataaaagcaagaccttgatttgcattntaataacttcttcataactttntgaacgtctttntgaacttcttcttcttcttcttcctttgccaaaagctttctaaagtttttggtttctaaaccttgttctttcacagaaaacaaaagt

SEQ ID NO: 18254 - DNA, 365 bp, Glycine max
agtttgccatgaatcgtgccatgtgtactagtaaagaggctggcataatcctgtcataaaacacaaccataaactaaaataagcatatgtgatcagtgtcaaaataaaaccaaccatttacaaaaccaattaagaaaataagaatagattattacagctaaccaatcaacaagcctttcaggtaaccatgcttgacattgcttgtccacataaaatatttcaattaactcccacgcagctttcaaagatgtaggctcttcacctctctatattatgtgtaatgcgttaaaaagcaaatgattaacttctcggtatcataattcccacaagcagatctcagctcagctaaacacgtgaaacaaatt

SEQ ID NO: 18255 - DNA, 422 bp, Glycine max
gtgcagaagaaaatgagaaatttaacaaacattgtgttgttatgtttttcatttttaattgtaatgttagttttagggggaatgtattttaggtaaaatgtgtaatagcagcttttgatattgtaattgttgttttgctgaagaatttgtagtaggaagtagcttttgtagtgtaatagcagcttttgttgctactgtcaattgttgttttgctgaagaatttgtaataggaagtagcttttgtagtgtaatagcagcttttgttgctactgtcaattacccatttcaattaaatataatttgttggtgaaatttgttgctgaaatttgcagtgtattaaatataatttaataaaagatagagaattatgtaataagacgcagctcataatgtatgttgggatggattgtactactccaact

SEQ ID NO: 18256 - DNA, 375 bp, Glycine max
  unsure at all n locations
agttttacatatttccaactaaaatgggtctgtcttgcaataagattgtacttgtttgatgatccagatcatatgatggcaatgaagatgatcaaccaagcactgtgaggaaggggaaaataaagtctttcacttcttattgtggtggacttccatctcctgaagctgctaacaatccattagcatataaattcaggtacttcttggaatgtctttgtcaaactcaagagtaaggataccgaattatgtatttaattagacatgatttataaaacatttgaatatcttagtgtaagtttccaaaacccaatgcttttgaactctctgctntgtagtattttcatctggctaaccattcaactatagtatgtcaca

SEQ ID NO: 18257 - DNA, 349 bp, Glycine max
  unsure at all n locations
taataatctatggcttgaaacaagcctcccttctatgnatctaaagtttcatgatgtcatcacttcatttgactttgaagagaacatcatggatcaatgtatataccaaaaggtcagtgagagtaagatttgctttctgtgttaaacgtggatgacattttgcttgcaactaatgataagggtttgctatatgaggtgaaacaatttctctcgaagaactttgatatgaatgatatgggagaggcatctcatgtaattggcattaagatccatagggcaagatctcgaggcattttgggtttgtctcaagagacttatattaacaaagtttcacagagatttacatgaa

SEQ ID NO: 18258 - DNA, 402 bp, Glycine max
ttcacacttccatgtcgaataggcaataaaccttcgcttgatattgatcctcctaatgagactatgcagctccttcttgttttgaggtggcctcacttccaacattgctttagctttatttttatctgtcttgattcttctttgatggaaaaggaaacccaaaaagtttccagttgatactccaaaagcacatttctcaagattcatttctaagtttatgaaacctcatccttaaaagagaatcttccaaatcaccaagtgtttttcaaaattggatgacttaacaaccacatcatcaatgtaaacctccatcaatttgctaatcaattcatggaaaataacattcctagcccattgataggtagctcctaaattcttcaaaccgaatgacattaccaatca

SEQ ID NO: 18259 - DNA, 379 bp, Glycine max
  unsure at all n locations
agtttttgagttattcaaatggtcataacttttcactcggaggtccgattcaggcgcataatatatcgagacgctcgaaattgaacaatggaagctcttgagcaattcaaatggtttaactttttactcagatgtcctattcaggcaaataatatatcgagacgctcaaaattgaacaacagaagctctcgagaaattcaaatggtcataacttttaactcggaggtctgattgaggcgcattatatatcaagacgctcgaaattgaacaatggaagctcttgagcaattcaaatggtcataacttttcactcggaggtcctattaaggcgcataatatatcgagacgctcganattgagcaatggaagctcttgagca

SEQ ID NO: 18260 - DNA, 410 bp, Glycine max
tccattgttcaatttcgagggtctcgatatattatgtgttttaatgagacctccgagtgaaaagttatgaccatttgaattgctcaagagcttccattgttcaatttcgagcgtctcgatatattatgcgcctcaatcggacctccgagtcaaaagttatgaccatttgaatttctcgagagcttccgttattcaatttcgagcgtctcgatatattatgcgcctgaatcggacctccgagataaaagttatgaccatttgaattgctcaagagcttccattgctcaatatcgagcatctcgatatattatgcgcctgaatcggacctccgagtgaaaagttatgactatttgaattgcttaagagcttccattgttcaatttcgagcgtctcgatatattatgcgtttg

SEQ ID NO: 18261 - DNA, 439 bp, Glycine max
  unsure at all n locations
tcaacatcagaccacttccagggtgctggaactacttcacatggacttgatggggcctatgcaagttgaaagccttggaggaaagaggtatgcctatgttgttgtggatgatttctccagatttacctgngtcaactttatcagagagaaatcagacacctttgaagtattcaaagagttgagtctaagacttcaaagagaaaaagactgtgtcatcaagagaattaggagtgaccatggcagagagtttgaaaacggcaagtttactgaattctgcacatctgaaggcatcactcatgagttctctgcagccatcacaccacaacanaatggcatagttgaaaggaaaaacaggactttgcaagaagctgccagggtcatgcttcatgccnaagaacttccctataatctctgggctgaagccatgaacacagcatgc

SEQ ID NO: 18262 - DNA, 425 bp, Glycine max
  unsure at all n locations
gtgngatcatttcaaatatcgtaatcttcttatccttcaaccttggatgcttttaagggattttgatgagatcatttatcctactgagcaatgtgggggcttctttcctaatgctagagctaatgtctttggtagcatgattgatgtgtgtttcttgtttgatgtttactccatcagtagttttttcacttggtaaaaaaggtgtagaaataatgttatcatctcccgtatgttggataaatgcttgactagtgatacttggaagaatatgtttcctaatgcttatgtggaggttctttgcaggatgcattcaaatcataatcctctattcttgagatgtgatcgtcaagagaatagaggtgtcaaaccttttatattcgaagcaacgtgaaccactcacccacaatacaagattgtggttgcta

SEQ ID NO: 18263 - DNA, 444 bp, Glycine max
  unsure at all n locations
ntcaatgctcttaagcaaaagttaaccaatgcccccatacttgctttgccaaatttttcaaaatcttttgaaattgaatgtgatgcttcaaatgttgggattggggctgtattgttacaagaaggtcatctaattgcttattttagtcaaaaattaagtggtcctacccttaactattctacttatgataaggagttgtatgccttagtgagagcgttgaaaacatgacaacgctatctttatcctaaggagtttgtgatccatagtgaccatgagtccctaaaatacttaaaaggacaagctaagctaaacaaaaggcatgccaaatgggtgaaatttcttgagcaatttccttatgttattaaacataaaaagggaaaaggaaatattgttgcggatgccttgtcaaggagacactttntgctntctatgcttgaaacaaaa

SEQ ID NO: 18264 - DNA, 423 bp, Glycine max
  unsure at all n locations
tactaaggcacctgttctagctcttcctgactnttcttaattnttgagctanaatgtgatgcctctggagtgggagttggagctgtattgttacaaggtgggcaccctattgcttattttagtgaaaaacttcatagtgccaccctcaattatcccacctatgataaagagctttatcccataataagagccctccaaacttgggaacattaccttgtttccaaggaatctgtcattcatagtgatcatcaatcactaaagtacattagagggcaaagcaagttaaacaagaggcatgcaaaatgggtagagagccatgagggtgggctcatgggccactntgggatagacaagacccttgttttactcanagaaaaagtttattggccccatatgaagaaagatgtccataagcattgcact

SEQ ID NO: 18265 - DNA, 384 bp, Glycine max
agtttgactagttggttttatttggggtgatttttgggtctggattttaagaaaggtttatgttatgttttatttttatttaattgattgtggagatcttaaatcttgggataagaaggcttatgttgtgttttgttttgttttaatcgattgtggagatcttgaatatggagaaaagatggatttatgttgtgtttttattttgttttaattgaatgtggagatcttgaatatggagaacttgaatttgagatatcattcatgtttctatctttttaacttcaattaattttgacatgttttaaactgccaaaaaattgtaatttgattttctgaatgaatactagagggtttaaaaactactgaaattgtaatttccgaatg

SEQ ID NO: 18266 - DNA, 371 bp, Glycine max
agcttccaagatgcactgtaccttaacaagctccaagttaaaggcgaggtttatgatccttctgtgaagggcccactggtcaccctcgaggcccacaaagccctgtccaaagagcaactcgactgacgggtgaacggaactttcacatactccccgcgcgtgttcatgagcacctccttaatcatgtccggttcggttaccgccaaccgcggcgtcgaaccgaaccagtacaagaaagttttcccatacgcgcgagaccaccggacgtagaatggagccacgcgtcccatgatgtcgtggtggaacggaggaggggatgcacttgcctctgacttggcttctgcgtagagccgtcggatctctgatgtatt

SEQ ID NO: 18267 - DNA, 406 bp, Glycine max
cagtagatgaagatgaatccgtggccttctttggactcctctaaggacaatagcatcatttcttgcactgaattgttgggagttggaagtcatcttctcaatcaaattccaccactggcagtatcaatcatactcctctccatgttgctaagtccctcatagaaatattgaagaaggagttgctcagaaatctggtggtgaggatagcttgcacacaatttcttgaatctttcccagtactcatacaagctctctccactaagttgcctgatgcctgaaatgtcttttctgatggcagtggtcctagatgcagggaagaatttctccaagaacaccctcttaaggtcatcccagctgataatggacctgcgagcaaggtagtagagcccaatttttgccactccct

SEQ ID NO: 18268 - DNA, 433 bp, Glycine max
  unsure at all n locations
ttcaaaattgatagtggcctgtcacttgatatttttatatgcgaatgggacatccttctttgaagattactaaattggtttcaaataatagtagtaggaataatgactatggaaataaggcatgtgatgtttgccaaagggctaagcaaactcgagatagctttcctttaagcaataataatgcagcagatgtgtttgagttagttcattgtgacatgtaggggccttataaaactccatcttcatgtggtgcttattattttttaactatagtggatgattattctcgagcaatttggattttcttgttgttagataaaagggaagcacctcgtgctttgntgaatttaattgcattagtagacaaacaatatgaaaaggagggtaatatgattcgaagtgataatggaaccgaattacatgtttgcgaact

SEQ ID NO: 18269 - DNA, 381 bp, Glycine max
agtttgccgccacggagttttccgactatgctcttgtgtggtggaacaagctacaaaaggagagagcaagaaatgaagagccaatggttgatacatggacggagataaaaagatcatgaggaagcggtatgtgccggctagttactcaagggacttgaaattcaagctccaaaaactaacccaaggcaacaagggggttgaggagtatttcaaggaaatggatgtgctcatgattcaagcaaatattgaagaagatgaggaggtaactatggctcgatttcttaatggtttgactaatgatatccgtgatattgttgagctgcaggagtttgttgaaatggattatttgcttcacaaagcaatccaagtggagcaacaatt

SEQ ID NO: 18270 - DNA, 389 bp, Glycine max
  unsure at all n locations
tcgtgtgaatgtccacgctctntcccttaatacttgtattactacgctcccatatttctctgtatacatatattctcaatttaatgtatgtgtcatgtgtgtatacacgctatgctctagctatctagtcaaatgtaattgtatccatgaccatatatacacattaaaaagaagataaaacatatttttttctcgtatattttcgttcaaacttaatgttaatttttgtattaaataggtgaaatgtaagagactaaatacacttgattgttttaataaagtatagagattaattagaagtacaaggattaaaaatataatttatctttatgacaaacaactgaaaatcaatatgagatttaaattaattaattatatattatttcatg

SEQ ID NO: 18271 - DNA, 425 bp, Glycine max
actcagcttatagtgatccctttcagaagaaatgttctttattgatcactcctactgatcaagtcattttcaagaaactttgcattccttgattccacaatcctagtgttgtgggatggacaatagaacctataccctttagacctttcagcatatccaatgaaatacccagtaatattcttagggtctagtttcttctcttgtggattataaattcttacttcagacagacatccccaaatgcgtatatgtcgcaaacttggtttccaacccttgaatagctcaaaaggtgtctttgagacaatcttggttggaactcggtttaatatatacgcaaccgtcttaagagcatcaatccaaaaaaattgaggaagctttacattactccttatgcttctcaccatgtctaataagggtcgatttct

SEQ ID NO: 18272 - DNA, 294 bp, Glycine max
  unsure at all n locations
cattatcttcatcatgaatgaaagcaatgcatcattcattgtgatttaaagtcatgcaatgtccttcttgatgatgacatgactgctcatgtgagcaattttggcatagcaagacttatctcaatcatcaatgcctaccacttctaagcaaacaattacaattggaataaaggggactgttggctatgctcctccgggtatgttctaaaatctaaactggtgaatgaatcagnntttctttgaatcccctatttttttataaacactttatatttactaaatacaaagtattga

SEQ ID NO: 18273 - DNA, 441 bp, Glycine max
  unsure at all n locations
gtcgtgatattgaaatggtcataacccttcacacgtatgtttgatttatgcgcattatatatagagacgctcgaaattgatcaccggaagctctcgacaaattgactgggacataacttatcacaccgaggtccgatacatgaacatcccatatcgatacgctcgatattgaacaaccgaagctgtcgtgaaccggaaatggtcataacccttcacacggatgtacgattcatgcgcatcagatatggagatgcctgatactgaacaacggaggctctcgagacactaacattgtcataactttccactcggatgtgctattctagcacattacatatggagacgctcgaaattgaagcacggaagcgtatcgagaaattgaaatggtcataacttttcactcggatgtccgattcangcacatcatatattgagatgccc

SEQ ID NO: 18274 - DNA, 315 bp, Glycine max
  unsure at all n locations
agttttgaattgngtgtcgntgtcagtgacaatggcgtatgggaggccgtacctgcatatgaggtgcttccaagtgaatttttccacctcgttggtcgtaatttcaccattggtctttcttctatccacttagtaaaatagttgatggcaactagtaagtacttgacagctcctagagcctttggcagtggtcccagtatgttctttccccacctgnggaagggtaaagtggagctaagactgtgaaggttgtcaggaggagtgtgtggcacgtctgcaaactcttgacatcgtctgcatctcctagtaaagtcg

SEQ ID NO: 18275 - DNA, 382 bp, Glycine max
  unsure at all n locations
tccttaagaagattcgtaaagaagctagagcttagctacacatacctctctaatagctaagctcacctccttgagatgagaagctagagcttagctacacaccccctataatagctaagctcacccccatgacaaaaaacatgaaaataaaaaaaaagtccttattacaaagacaactcaaaatgccccgaaatacaaggctaaaaccctatactactagaatggccaaaatacaaggccttgacgaaggaaaaacctattctaatatttacaaagataagcgggctcatacttagcccatgggctcgaaatctaccctaaggctcatgagaatcctanggtctttccttggatctctagcccaatctacttgagtcttcta

SEQ ID NO: 18276 - DNA, 360 bp, Glycine max
ggatgtgtacgattgtaacaattgttcttgaaatgcgccatactgtgttgcttttatagactctacatgtctggtcaagaacaccatattaagagttacaacctttagaaaaacttgaaaaccattggaagaggtacatctttggatgttaattcaaaacttatcactggtaatcgactaccaaatcattgttgatagtgcttatctctactgagtttataaaagattggctaaagttttgttaaaacataggcacttagactatgaatgaaagctggagttgcttgtcatgatgtgcaacgttatgtctaaaaataagatcgggctgcacaatgcacactgcattacgaaatgtcaaat

SEQ ID NO: 18277 - DNA, 370 bp, Glycine max
agcttttgacggactataccttgctctaggaaccagggacggagaaagatctatatataggcttgctaagggtagagagaggaagactagagatttggatcaagtaaagtgtgttaaggatgaagaaggcaaagtcttagtgcatgaaaaagatatcaaggaaaggtggaaggcgtatttccacaacttatttaatgatggatatggatatgactctagcagtctagacacaagagaagaggaccggaactataagtactatcgtcggattcagaaacaggaagtaaaggaagcgttgaaaagaatgagtaatggtaaggcggtggggccagacaacatacctattgaagtgtggaaaactcttggagat

SEQ ID NO: 18278 - DNA, 435 bp, Glycine max
  unsure at all n locations
cagcttctgttgttcaatttcgagcgtctggatatattatgtctcaaattcttacatccgtgtgaaaagttatgaccattagaatttctcgagagcttccgttgttcaatttcaagagtctagatgagttatgtacgcgaatcgaacatctgtgtgaaaagttatgaccattcaaatatcttgagtgcttccgttgtgcaatttcgagcatcttgatatattatgtcccaaatttggacattcgtgtgaaaagttatgaccattcgaatttctcgagagcttccattgttgaatttcgagagtctagatgagttatgtacgcgaatcgaacatccgtgtgaaaagctatgaccattcaaatatcttgagtgcttacgttgtgcaatttcgagcgtctcgatatattatgtgccanattgcgacatccgtgtgaaa

SEQ ID NO: 18279 - DNA, 394 bp, Glycine max
tgtgcatccaataccctgatatgatgttttcatatgtttttaaaaccggactgattcatttgcttccaaagtttcatggccttgcaggtgaagacccgcacaaacattcgaaagaatttcacattgtctgctccaccatgaaacccccagatgtccaagaggatcacatatttctgaaggcttttcctcattcattagagggagtggccaaggactggctgtattaccttgctccaaggtccatcacgagctgggatgaccttaagagagtattcttagagaaatttttccctgcttccaggaccacagccatcaagaaggatatctcatgtattagacaactcagtggagagagcctgtatgagtactgggagagatttaagaaactatgtgc

SEQ ID NO: 18280 - DNA, 391 bp, Glycine max
  unsure at all n locations
agctttgtatgtgttcaagcatatagcaaatcctatctatatatctgcaaaatcattntcaggatctgataacttcttatcagacgttagttcatcattgaatttaacatggatggattcttctacaactaaagttcttgtactaaaaacttatatgctttagatgtattagataaaccaagaaaaatccctttgtccactttggaatcaaacttagcaagttgatctttagtgttcatgataaagcactcacatccaaatggatgagagtatgaaatattgggtcttcttcctctctatggatcatacggagacttttttatcaatggtctgatcaatattctattctaaacatagcaagttgtatttactacttctgctcaaagtactt

SEQ ID NO: 18281 - DNA, 428 bp, Glycine max
tcatgagaaagtaaaagatcaaattgagaggaaaaatatttgttatgttaaacaagccaacgaagggagaaagaaagttgtcttcgaacccggagattgggtttgggtgcacatgagaaaagaaaggttttcggaacaaaggaaatcaaagcttcaaccaaggggagatggaccatttcaagtgcttgaaataatcaatgacaataattacaaagttgagctacccggtgagtataatgttagttccaccttcaatgtatctgacttatctctttttgatgcaaatggagaatccgatttgaggacaaatccttctcaagagggagagaatgatgaggacatgaccaagagcaagggcaaggatccacttgaaggacttggaggacctatgacaaggtctagagcaaggaaagcaaaggaagctcttc

SEQ ID NO: 18282 - DNA, 415 bp, Glycine max
  unsure at all n locations
tcaagaattatggcctcattttactacctgtttcccgatggaaatnctataaatagacctcccatctttaatggagtgggttatcactactggaaaacccgcatgcaaatctttatagaggcaatagatttaaatatttgggaagccatagaacaaggaccttatgttccctctataatagctgcaagtgcaacaatagaaaaacctagagcagattggactgaggaagaaagaagattagtacaatataatttaaaggccaaaaatattattacatctgccttaggaatagatgaatactttagggtttcaaattgtaaaagtgctaaggatatgtgggatacactacaagtaacacatgaaggcacaacagatgttaaaagatctatgataaacactttaactcgtgaatatg

SEQ ID NO: 18283 - DNA, 408 bp, Glycine max
gtgatggtgtcgagaagtattcacatgtttgtcatcatcttaaagggggagaatgtgaatgtatgtatacatgattttgatgatgtcaaaagaaaaatcaaacaaagttgcttcaaaagataagcatggcttcaagattaatacaagattgcttcaacaaacaaagtcttgcttaaagattaactcaagatcaagccttgccttaaaacaaagtgctttcaagacattcaaggctctggtaatcgattaccaggcagtgtaatcgattaccagaagacagggttgagaaatagctgttgaaaagggttttggaattgaattttcaagatgtaatcgattaccatatgtctgtaatcgattaccagcaacgaaactcctgagattcacattcaaaagtcatgacccttc

SEQ ID NO: 18284 - DNA, 428 bp, Glycine max
tccttcaattctggaatcaattgccatttcagttgagatatagccatcataattgatttggaaagagagtcagcaactacattctcttttcctggcttgtactcaattgtgaaatcataacccgtcaacttatgtatctagttctgttgctcaagagtgtgcacaacttgattatttagtgatctgaggctcttttgatcagtcctaatggtaaatttgtgaccaagtaggtagtgtctaaatttagctatggttgtcgtaatagcaaagaattcccttgcatatgctaatttttttttgcattctcgcattcaatttttttgaaaaataagcaataggatggtgcatttggctcataatagcagctagaccaattccagaagcatccgtttctaaggtgaatgggtgtgaaaattatggtaaagcca

SEQ ID NO: 18285 - DNA, 376 bp, Glycine max
agcttgtattgatttggtctgatgagggatcgaggcttagtaatttaggctacaacatataacacatgagaaattgattagagaaatatattgagacacacaatttcgtgctccttctctccctctccctccactcatcttctccttccttcaagctcttatccatggcttcctatggtggtgagcttcttcttgactcatcttctgcttgaagtggcatctccaatcatatttctttcttctgtattccactgccattaaactaccagaagccaaagactccattgatgaaaaagatccaggcctacaagctccacatggaagttacatcatgctggatcaagagcatcttcggctaagtgatggtcttttgctt

SEQ ID NO: 18286 - DNA, 391 bp, Glycine max
  unsure at all n locations
agcttttaacgtatattgagaaaggattttctactttaaagaaaatagtgatttgtgggatcttttagttaaggtatgtgactttttttacaaaactgatatcaaataaaaaattatataagtttttctaaaaatggtaataaaaaattaaaaactataaaatttaaaaggataaagtgattgctcattaaagaatttggtctagacagcagaatgacatgattgctcattaaagaatttggaaacagaaatatcattccttccccttagaatttttaatttatcattaaaaaataaataaagatagactcttggaataaagtaattntttcagataaaaaaattactaatgactntacaagaatttaaccaactactaatatgaaattct

SEQ ID NO: 18287 - DNA, 334 bp, Glycine max
agcttttgtccctgagaaactggttcccagaagacaacagggagtgaagattgctgaaaaccctagccttgcaacaagttctagggaagtagacaaggagatggacaagaaaatccgcagtatcgtgagtagcattttgaaagacgcctctgttcctgatgctggtgaagatgttccaacatcttccaccccgaatgtttctgtgccggatgttgagaaagatgttccaacatcttccgggccaaatgctgaagtactctcttcccccagcaaagagagatcaacagaggaagatgatcaagcgacaaaggagacccctgcaccaagggcacca

SEQ ID NO: 18288 - DNA, 417 bp, Glycine max
tcaacatcagaccacttccagggtgctggtactacttttctggacttgatggggcctatgcaagttgaaagccttggaggaaagaggtatgcctatgttgttgtggatgatttctccagatttacctgggtcaactttatcagagagaaatcagacacctttgaatattcaaagagttgagtctaagacttcaaagagaaaaagactgtgtcatcaagagaattaggagtgaccatggcagagagtttgaaaacagcaagtttactgaattctgcacatctgaaggcattactcatgagttctctgcagccatcacaccacaacaaaatggcatagttgaaaggaaaaataggactttgcaagaagctgctagggtcatgcttcatgccaaagaacttccctataatctctgggctg

SEQ ID NO: 18289 - DNA, 432 bp, Glycine max
cttctcttcatcctttgccatatggaaaatagacatttttttatcacctctaaaggttctaggagcagtaaaatacttactagttgttatcaactacttcaacaagtggattgaaacaagaccactgcgggaaattatggccaatgaggtggagaaattcacccggaaacatctcatttgtaggtacgacctaccatgcgccattgtcatggacaacaacactcaattcaaagctcagacttacaaagaattcctgacatgactacgcatcaagcaccaagtcatctctttcgaacatactcagaccaacggtcagacaagggcagctaacagagtcatcctcaggttcctgtgtactacactcaacaagtctaagtgtctatagaaagataagttcttcagtatactctgggcgtaccattgttcacccaa

SEQ ID NO: 18290 - DNA, 429 bp, Glycine max
taagctctttcaactgcacaaggctcttaatatttgaatagtatccttgtggaaccttcacccgacgaagacactaacaaaaacttatcttctccttcttggacaaagtatggcaggctgggggcaagtaaattttcttcccatcagaccttgtatgcaactgtgatcgtatacccatatcagctagatcttgacgggtattcaagccatccttcgtcttgccttgaatgttaaggagcgtcccaatgactctatcacagacatttttctccacatgcataacatcaatacaatgtctaacgtcaagatcacaccaatacggaagatcaaagaaaatggacctcttcttccatatgcaactttgacttttatccttcttttgggtcttcccaaatacagtattcaggtgttcaacccgctaatatacct

SEQ ID NO: 18291 - DNA, 394 bp, Glycine max
agcttgtcttcatttggtattttattcacccagtcttgtggctctacacaagggtgtctgcaaccttctaaaatagtatctccttcatcctattaaaatcaaaatgacaatgttaaatgctattcgtaaaaagatccctccaaccaaaacaagggataaacagagaaggaaggtaaatgcgagaagaaaagaatgtagtaattgtgaaaacaacaaattaagtaccaatgaagtgatgtcaggccttgtgtagggagtaggacaactagaagccaaatcagcaaatctcaactatagattcctatccatgtacattctttaaaaaaaattcatggttagtggggctctactaaatgttgtcatgacaagagtatattcattagacatcaaaatg

SEQ ID NO: 18292 - DNA, 420 bp, Glycine max
  unsure at all n locations
ntntgactcctgagtatttggaacttgctttatctctttttctttagcatcatcaaaataatcttggaagtcattgcttccacaaaatgaccaagaagtggcctatgcttctagacaactcaagactcatgagaggaattatcccactcatgacctggagttagctgttgtagtttttgcccttaagatgtggaggcattacctgtttggctccaagattgaggtgtttagtgatcataagagccttaagtacttgtttagtcagaaagagttgaacatgcgtcaaaggagatggtttgagtttcttaaagattatgattttgagcttagctgccatcccggcaaagccaatgtagtggctgatgccttgagtaggaaatctctacatatatctgccttgatgattagagagatggatct

SEQ ID NO: 18293 - DNA, 265 bp, Glycine max
tctagctttactatgcaaagaatatccaaggaaaattccttcatctgacttagcatcaaactttcctaagttttcttttccattgtttaatacaaaacacttgcaaccaaaaacatgaagatgcgagatgtttggtttcctaccattgaatagttcatatgaagttttctttaaaatgggtcttattaaagccctattcatgatatagcatgcagtattaatggcttcagcccaaaaatattttggaagaggagtatcatttaat

SEQ ID NO: 18294 - DNA, 357 bp, Glycine max
agctttttagttttcaagtgccaattcgtcctcttctttagtccagtcttcttctggcttcaattcatcagtgggctttccttctgtgtccagcatcttgggatgttcccagcctttgatgacagctttccaggttctgctatccagtgatttgaggaaggccaccattcttgctttccagtattcatagttgcttccatcaagaattggtggtctgttcactggtcctccttctttctccatgttcatcagaatttatctccccagatctcactctgtgatttcgagtgttggctctgataccaattgaaattctgataccaggggacagatgtcgtacaggatgtcacgacatca

SEQ ID NO: 18295 - DNA, 412 bp, Glycine max
  unsure at all n locations
ntatatacaaattaaaaaattattaaatagccacaagtctagaaaaatataattacatttgattaatttatctttttattttattgatattatctcttcttttactttatagagatgtcaaaaaactaaataaattaaaagtggacaactaataataattagtgtctttttcaattgagaagggtcaaaatacactttccaataactaactatctatcaatctctatgtgtgttaattttattaatcaaatagctgaattaaaagtttttattaaataaatgaggtttataattacttcgttaaaaaatttcatctaatgtaaaatgtatttcttaaaaatataagtaaaagttgattatagaactacatatatacaaatattaaatttatttaaaatttaatatatcgatt

SEQ ID NO: 18296 - DNA, 337 bp, Glycine max
  unsure at all n locations
agcttttatccaactgtaaaacttggcaataacactagaatggctgttgtgggaaaatgtatcattcgaatgcaagtgaatggatttactcaggcaatttctggtgtctattatgttcctgaacttaagagtaatttattgagcatagggaaacttcaagaaaaaggcttgactattttgattcaacatgggaagtgtagggtatatcattntgcaaaaggattaattatgcagacagatatgagtggaaatataatgttttctttgttggctaccatgataccaaaagctttctcatgtttccaaattgtatcagaaaatgaatctcatctttggc

SEQ ID NO: 18297 - DNA, 425 bp, Glycine max
  unsure at all n locations
nttactctctggtaatcgattaccagaggatgtaattgtttaccagtggccaaatacgttttataacagctataaaaatttgaattcgaaattttaaaagctgtaatcgattacacaattgtggtaatcgattaccagcagttagtaaacgttttaattcaaattttaaaagctgtaatcgattacacaatttctgtaatcgattaccagacaggaatttcagaaaaataatttcaagagtcacaacttttcaaaggctttactcatgaccaccaatggtctatatatatgtgacttaaacacgaaattgctcagagattttcagaacaacaaagtgtttatcctctcaaaaagcaatttcattttatcctcttaaagaattccttggccaattcaattgcaattcattaaggaattaattgagt

SEQ ID NO: 18298 - DNA, 422 bp, Glycine max
  unsure at all n locations
ntggtaccttgtactgtacatataagactttgattcttatttaaagtttaaaataatgatttccaatatgaaggaatttagtaccgttagttattatgattattcttagtatttttttgtttcaaaataattatcatccttcattattttatataaaaaatattgcataaataaaatagaataataattttacaaaattaaacttatatcattattaatatataaagaatataaataaaagaagtaattaatgttacattacaaattaaaatattaaaatgataattattttaagataattaagatattaaaatgataattatattaaagttgagctaaaacagttattttcattttttttctcaacataaatatgtttaacatagataattttttacttttaaggttttagagcatcctcg

SEQ ID NO: 18299 - DNA, 347 bp, Glycine max
  unsure at all n locations
agcttatcaccactctccttcataccactggccacaccaccaacaacttcagcttcgtgaatctcacttgcgactcccaatttggcgtcatctcgatcctcttccccgcaccgtactctccctctaatgccaccatcctcttcttcataaagaagcgtgatggcactagaaaaccactgagcgccactacgctgaactttctcctcatcggtagggacacatcgttggtggcgctaagctggttcttctgactcttcatgaaccaccccatcgtggaagaaaagatcctcgcagagctaacgttggtgcttacttncactcatggcggcgaccgacgacactggatg

SEQ ID NO: 18300 - DNA, 426 bp, Glycine max
tgttaacccatggaagctcctaatatctcctacactttcggggtgttccattcttggatggcgttgattttctcagggtccacttggaccccatttctacaaactacaaaccctaagaaaactatattatctacacaaagggtacaattctctatattttcatagagggtgtttttcctaaggactgaaagaacttgcctgagatgtcctaagtgatcatctaggctcctactgtacactaaaatatcatcaaaataaacaactacaaatatacttatgaaatcccttaagacatgatgcataagcctcataaaggtgctcggtgcattagtgagcccaacaggcattactagccattcatacaaaccaaacttggtcttgaaagcggttattcactcatcaccctctttcatcctgattaggtga

SEQ ID NO: 18301 - DNA, 342 bp, Glycine max
tgacaaacaaagctaatcgaagcaagtaatatataaaatctattattttcacaaaatcaatagtgcaaaaggcatttgaaatggtaatatcttttaatattttatattcattttcttataagttatataataataactcattttttattttgtgattgcttttatatgatatatgaaaggttggcgaaatttataaaggcatcatgcattgcattatattatttaatttgctctttactatatttaattttaacagacaaaagatccaatatctagtgaatgatcagatgctgcggaagtttggaaggccacacacacgagatctaatggaacctgtgcatt

SEQ ID NO: 18302 - DNA, 423 bp, Glycine max
taaaagtatcactttgtttatcaaatttatttaatgtgtatgtcaaccttcctgtaaaaacatgctccctcactccaagaatgcttggagggcgaaggccatgattcgcatggaactcctccagaagattcctcattttcattgcttcttcaagataattgtcctttcaaaatttaaaaaatatatatcagattaaattacataaattttctttccccattcattcattcactcacatacatacagttgagggcagaggaagagggatttctctacaaaaggctggtgaaccacatattaatccaaggtcaataagtatgcaacagtccaaatgacatgtaaaagtgaaattcaaggatttggaagaactgaacaagtacaacaggataaaaatctcactaatgccatgaccgcaacaggatt

SEQ ID NO: 18303 - DNA, 428 bp, Glycine max
  unsure at all n locations
tgcaatgaanattaacataacaatgtatttataaagtttcgacaaattaatacaaaaatgataaataattcttaatataaaattgacatcattttggtccaagttaaatgcattttggtagttattatatgaggcaaggcttatgttttcatcttcctaacatgtaaaattaacatcattttttaacattccttttgataaaattgtatatagtcattgttgtacaaattatttgcatttatgtttcaaatttgtacttaggcatggatcgtaagattacaaatctattctttcatactcgaaacgttctttcaatagtgcaccttaaacttaaactggagtgataataattaaaaatttcattattatttgcaaactcagatctatgtctaaaattaggaaggtggtaacgtttacatatgtaagga

SEQ ID NO: 18304 - DNA, 380 bp, Glycine max
agtactctcattttttatcaagtctgcacgattgtgatcaagatcaaaagctcgccaaaattcaggccagttacatagaagtcgaccagatcctacaggggtgttctccacaacaacttgggcgggagcaggaatgcctgcattctgcaaaccaactgcattgctgtcaggatcaactgaatttgaaaattcagatcctggagcttcatttgagtttgttgataccgcaatagctgaatccacaaaagttgaatgcccattttgaacttctcctgtagaagatccattgttcaaattttcactagtgtgaacaactgatgattgaatatttgaagcctgtccagaacctgggtccataacagttttatgatagctgtctg

SEQ ID NO: 18305 - DNA, 385 bp, Glycine max
tcaagcttttttaataagatggcctcagcaaattccttatttccagataggaattctatcaatagacctccaatctttaatggagagggttaccactactggaaaacccgaatgcaaatttttatcgaggcaatagatctaaatatctgggaagccatagaaatagggccttatatacccaccacagtagaaagagtttcaatagatggtagttcatcaagtgaaagcataaccatagaaaaacctagagataaatggtctgaagaggatagaaaacgagtacaatacaacttataagccaaaaacataataacatatgccctacgaatggatgaatatttcacggtttcaaattgtaagagtgctaaggaaatgtgggacactc

SEQ ID NO: 18306 - DNA, 412 bp, Glycine max
tttcaagagacctactctttttgactgttttcaagagttggtcttcttggttgaacactgaacacaagggaccaatgttccttgggttcattgcaagaagcaggatttgcttcttggttgatcattagacgcaaaagaccaatgtcttttgggttcattgcaagaagtgggtataatttcttgggtgttatcactggacacaagggaccaactttccttggggttcattgcaagaagtgggaataacttcttggttgaaatcactgaacacaaaggagggaagtcctttgtggttcattgcttgcaaaggattttacaaggttagtggaaatctcaagcgaattgcttgaggactggacgtatgcacgggttgtggtcgaactagtataaatccggatatgcattctctctt

SEQ ID NO: 18307 - DNA, 366 bp, Glycine max
agcttggtagttttttaggctttgagtcttaacttatccagctcattcaattgttgctacctgttgctacctacaagcctaagatcaaagtttagaaactatagagcccacatggctttgtgaacaagttcaacaagcaaatggaaattcttcccataaactagactaaagggagacatcacagtgggagtcttaaaggtttttttgtatgcccagagtgtgtcatccaatttcaatgaccaattctttctagatgctctcacagttttctgtaagaccttctttagttacctattagatacctcaacttaaccaattgcttgagggtgataaagagtaataaccttatgggtaacaccatattta

SEQ ID NO: 18308 - DNA, 427 bp, Glycine max
atgcagcccaatccttcctttaagtaggtacggcgctttctagtactttcttgatctccctagtctaaactccaacttttccatttgtttacggatgataaggtgatgctactttgtgtcaaacatcatagtgttgaaagacctttgagaattgagcaatacaaaagtgtgtaccttcatcactaatcaagagtctaggcaatcaaaacctaacaaaaatgtttctctttaagatattaatcatcatctttacatcattggttggactagaaatttcttccacccactttaagacatagtgcactactaccaagatatatctgttgccacgtgaggatggtaagggaccaaaaaaatcaattccctaacaatcaaacacttctacctcctgcatgttctgtaatggcatttcatgtcgtctagatat

SEQ ID NO: 18309 - DNA, 293 bp, Glycine max
ttgcatgttagcttctgatccaacccagcacggtttcgatgcccgaacctgctggatcggagtccgaagcaagaagccgatgcaactgcatgatggagttaaccgccacggcttcgttcggattcacctgcagcatccacggcttcacgtcttcaaggcgccacgccgccacgccacgaaatgcaaacctaacattcacggaccgcgccagctcagcgagcctgagcccaatttcgcggagcgtgtcgcggttgtcggacgagggaagcccaattcccgtgagcctcaacagc

SEQ ID NO: 18310 - DNA, 407 bp, Glycine max
  unsure at all n locations
tattctatgggatttaccaagcacacaattatcacatttttcaagtttatctagtttatcaccacctagcatattttgtttctcaagttcatgcaatcctctttcactaacatgacctaatctcaaatgccaaagttttgttttatcaatcaatgtattactagttaccgatgcatttccaacaatcgtggaaccttcaagaataagcaagccattacttttattcttgtcacccttggcaatgattaaagatccatttgaaatcttaagaacaccatttaaaattctagttgaatatcctagatcatcacacatgtttatgaaaataagatttcttttgagttctggaatgtaccttacattnttcagtagatactctctattatcaaacatcttcaatctcacag

SEQ ID NO: 18311 - DNA, 381 bp, Glycine max
  unsure at all n locations
agctttattaattagatggcctcagcaaattccttatttccagaagggaattctatcaatagacctccaatctttaatggagagggttaccactactggaaaacccgaatgcaaatttttattgaggcaatagatctaaatatctgggaagccatagaaatagggccttatatacccaccatagtagaaagagtttcaatagatggtagttcatcaagtgaaagcataaccatagaaaaacctatagatagatggtctgaagaggatagaanacgagtacaatacaacttaaaagccaaaaacataataacatctgccctgggaatggatgaatatttcanggtatcaaatcgtaagagtgctaangagatgtgggacact

SEQ ID NO: 18312 - DNA, 444 bp, Glycine max
  unsure at all n locations
acttagagtccaagaatgttgtttatctttcccatcatagacatcgggagattctatctacatacaacttgaaaattccttacacaaagtttcattagtagaactaaatataatattatcaacatatatttgaacaattaacaactcattggttactttcttaataaacaatgtttaatcaacttggtctctagtgaaagattgctcaagtagaaaactgctcaatctatcaaaccatgaccttggttcttctttcaaaccatactttttcagtctatagacatggttaggatgctagtagtccacanaacctggtggatgatctacataaacttcttcttcaatgagaccattaaagaagatacacttcacatccacctgagtaagtctaacatccatgatacatgcacatgcaagcagcaatcttatgtgatgtagctcatg

SEQ ID NO: 18313 - DNA, 463 bp, Glycine max
tcgctctttgtgggagtcattatcaaaactgaagcctttcttatttgcacatgtggagcaattaaaccttggcgcaatcttgaacaaatggagtatgctatgcagttcttgatggggttgaacgaatccttctctactattagaggtcaaattttatccatggatcccttttcctcagtaactaatgttctttccttagttcaagaagaaaagcaaaaggaagttggtgcttcctcctctgctagtgaagtttcacatgcttttgccttgaagccttcttctgctgcacgcaatcatcctaccaatcgcttcaaaggatcttccaagaatcgccccttgtgtgctcattgcggtatgctggatcatactcaggatcgttgcttcaagttgcatggctatcctccaaattataagaggactagttgttcctcacaagtcaagatacattcttcatcttctgaat

SEQ ID NO: 18314 - DNA, 467 bp, Glycine max
  unsure at all n locations
tagtctgtgatgggaaaatcaatggtcaatattccatctcattcataagntgttatgcattaacatataatatcgattcatcgttatggattatatatgattacttatttcacatatacttaattatagagagggagagattaaatggatacctttgagtggtatgagacccttatcaaaaagagaacggtagtgcaaaatagacattaaggcacaagcactgaccggtgaaaatagagcaataggaagtgaaagttcttcagcagcttgtatagtaaaaagcatggaacaatcagacaccaagcaagtaactggaggtacaaagccagcagtggaagaatcctgaagacgagcaagaagatcgcgaaagggtacgagcatcttctctctcactganttagcaagagacactgcgtcttcagtgacatcaccatcaccatatgtggggggaagactatctggtatgg

SEQ ID NO: 18315 - DNA, 457 bp, Glycine max
tatcttgattgaatgtagcagcaaacttgacgatatttctaatttttcatttctgcaaaggactcatccagctttgacattatagtgtttgtcttattgccattaaatcttacaggaatgtccttttccataatcaaggttttagagttatacactctatatgccttggataattgagagtatccaagtaagattccataatcacatttggagtcaaactcttcaaagttatccttggtgttcaaaatgaaacgttgacatccaaatgggtggaaataagaaatattaggcttacgttcctttcacaattaatagggagtcttctttaagattgacctaatatagactctgttatgtaaaaaacaaacagtgtgatcgaggccgtacccgaatcatataaacatgataatgcagtaactaggaagtgatcctatgtcgtttcccaacgagcagtgac

SEQ ID NO: 18316 - DNA, 470 bp, Glycine max
  unsure at all n locations
ttcactcggatgtccgattcangcgcataatatatcttatatgttttataattgaacaatggaagctcttgagcaattcaaatggtcataacttttcactaagatgtccgattcaggcacataatatatcgagacgttcgaaattaaacaatggaagctcttgagcaattccaatgatcataacttttctctaggatgtccgattcaggcgcataatatatcgagacgttcgaaattgaacaatgaaagatcttgagcaattcaaatggtcataacttttcactcggatgtccgattcaggcgcataatatatcgagacgttcgaaattcaacaatggaagctgtcgagaaattcaaatgatcataacttttcactaggatgtccgattcaggcacataatatatctagacgttcgaaattgaacaacggaagctcttgagcaattcacatgatcataacttttcacttg

SEQ ID NO: 18317 - DNA, 386 bp, Glycine max
  unsure at all n locations
acctgtgcagcaaagtcaaactgcttctacagaaactaaaagccttggagaattctatgccagctcaaccttctgaacaacaagtcaaggagctcaagaaaacccaagctgacctttgggaaaaagctactatgcatgagtctattgtgaggcaaaaatcaagatgcagatggatcaaagagggggacagcaacacagcctattttcatagagttattaatttgaggaggaggagaaatgctttgagggggatgcagataggtgacacctgngtggaaaatcctaacattatcaaggctgaaaacctgcaccattttcacaacacggtcaatgacactcactcgagctgacctaacctggatggggttgcatttaaaactctgact

SEQ ID NO: 18318 - DNA, 424 bp, Glycine max
  unsure at all n locations
tgagaattggattgacctgtgctaagttgccaaatatttacagagttaggcacagtattattacaatcaacagaagaaacagtatttatacaagctggagaagacacagcagagcagaactgaagattgggaaactggtacaagccatcagatccaacatctccttgaagaaggattcttttggaatcctgatatttaacaaagcaacgattagcatgaaactcaaagaaaacatgattatctttggcaaatttgcttacactaattagattcttagtgatttgaggaacaagaagcatgtttttaagaataagttggccattaggactgaaaggagaaacaaaattggaattaccaggggctgagatattcagaccttgtccgttaccaatnttgatctgatctggaccctcaaatggacaag

SEQ ID NO: 18319 - DNA, 188 bp, Glycine max
ggggccatgacatgctaattgacccaaaggagggtattgtaccgatgacgttgatcatgtacgttctatcattagtacactccaccacatagttactcccaataccaaaattatttaatgttaaccagatgacccaaccaatacatactggcaataccatgactactatgtggcatgataatagcttc

SEQ ID NO: 18320 - DNA, 431 bp, Glycine max
tgtaacatgactgcttttcttatatataatcaccaaacaaaagattgccataagtatctcccaccaaccccgaagatcaaatctcatactccctccgtttcaaaatacatgtccatttttgaaaaattgcggtaaccaaggacaggctaatttgacacaaaagttcctattttaccctagtcctttatgttctccattatatatttatttatcccacctcataattactcccaataccaaaattaattaaagttaatcaaattacaataccaatacatactggcaataccaatactactaaatggcactatttttgcttcggtattgaaaagctcaattggcatagttcggttatcatagtttgttaaaactcaattgaaataacttccctccattattaattatactctaatcttacaatgttgtggaca

SEQ ID NO: 18321 - DNA, 326 bp, Glycine max
tacatagaagaccgactgaaccatgagatccacttcaaccacacgctaactttcctgatctatccagcaacagatacgaccctgcatggaggatttactttactctattatggcacactcctcaagctcatcatccacagcctgcttcgtccgtgcagcatgctgttggtcggctcataccatacatgtactgcagccttccatctgctattacacctcgccatacgaccaatatccgaggcgactactcaaccttgcctgacctaactggagctgaaaaagactatgcacatcatgccttccaacgagagacccatcctgcattc

SEQ ID NO: 18322 - DNA, 440 bp, Glycine max
tcgagactgaagagcgtgcgagtctttatctgtgggagggagaagagaacaatccaaaatcaattgtacccttcaagtagcgaagaattctgtttgcggctgttagatgaggagaggtaggagcctccgtaaagcgacacacaacttccaccgcatatagaatatcgggccttgtattggttagataccttaaactccccacaagactcttgaagaccatggagtctaccttctctccttcatcaaactttgataacttcaagccaccttccataggtgtgttcacgggattgcaatcaagcatactaaatttcttcaacacttcttttgtgtagcttccttgtgagacaaagataccattctccatttgcttcacttccattcccaagttatatgacatgagtcccatatctatcatatcaaattcacgagacatggac

SEQ ID NO: 18323 - DNA, 444 bp, Glycine max
  unsure at all n locations
catgcgaagtgggtggaattcctagagttattcccttatgttatcaaacataaaaagggaaaaggtaatattgtagccgatgctctttctcggtgtcatgcattactttctatgcttgaaacaaaattgattggtcttgaatgtttgaaaagcatgtatgaaaatgatgaaacttttggagaaatttttaaaaattgtgaaattttttcagaaaatggtttctttagacatgaaggctttcttttcaaagaaaacaaattgtgtgtgcctaaatgttctactagaaatttgcttgtttgtgaagcacatgaaggagggtttaatggtgcatttgnggtccaaaagactctagaaacattacaagaaacattttattggcctcatatgacaaaggatgtgcagaaattttgtgaacattgcattgtatgtaaaaaggcaaagtct

SEQ ID NO: 18324 - DNA, 462 bp, Glycine max
  unsure at all n locations
tataanaagtataataaattaaaaaaaataaaatnaatacttatattaatactatgtttgcatcaaatattcaaatgaacatttagatgtaatgataaaagggtgtgcatcttatttcaaggatcatagttctactcctaatttcttcttaaagcattcttttaagtaaggcttattaacatatgattaaataatattttagggaatttaatggtttaattcatattcaaatattttcataaccattaattaattattaatttcgacatttattttaacaaagaaattattatttttgaatattttaatttgaaaaaatattctttggaaatattattttatttacgtactcaagtttgtttgaaatatatgattaggtaatattattctatcgctattgacataatttacagaanatgttacaataaaaaagtgtgtgaggaatatatgaaatttgtttaa

SEQ ID NO: 18325 - DNA, 398 bp, Glycine max
  unsure at all n locations
gtacttcgggcgtgtattatagagcaacacggtagctggatggattgtttgccattgattgagtttacttacaacaatagctaccaagccagtattggtatggctccttttgaagctttatatggacgaaagtgcaaaactcctatttgttggtacgatgatggagaagcagtacttcttggaccggaaatgctacaacagattaacgaacaagtgaagttgattcgagagaagataaaagcatctcaggataggtagaagagctattatgatagaaggaggaaaccactagattttcaggaaggagaacatgtngttttgaaggtttcttccgtaaccggngtcggaagagctctcaaggctangaagttgacacccaagtatctaggtccgtatca

SEQ ID NO: 18326 - DNA, 460 bp, Glycine max
taataaaatttagttttgatgagaaattgattattgttaatgtaaaattatttccttaaacaatctatataaaacaagtcatgtcccatttttttaactatttatagaatctatcaccacctccaaactaccataaacataaaaactagggttaccttttgtgagtagagaggtgtgtctattgtataaaacaatttaattcaaacagttcaaagttattatcagagtcaaccaaagaaaattttctatgactcttatctaaactatcatcaaatacaagaaaagatgttttacgttatgacatttttcataattaaaagattaaaagttgtcaccacatatatatagtgacaaactttggattgatcacttatcatcactaatatgcaagtcactgttgtattagtgatgaatattttagatgtcataaaaatatatattgtgatggaaatgttgtcac

SEQ ID NO: 18327 - DNA, 467 bp, Glycine max
  unsure at all n locations
tctgccctattntcctataaatagggggagaagtgaatttgtttaaatgttcagctctcctggtaattcgagatcacttgaaattagtgaaaaaaattgtttccgtgaagaaaatccaagccgaggcatttccataacgtttccgtagcgtttccgtgggtaatttcacgaagattttcaaccgttctttgacgttcttcgttcgttcttcgtcgttcttcggtcttcaaccggtaagttcccgaaatcgaacttttcaattcattctatgtaccattagtggtcctcatttgttatccatggcctcctatggtggtgagcttcttctagactcatcttctccttgaagtggcgtctcctctctctcttccttctccattccgctgccattcatcttccaagaagcaaaggaatccattgatgaagaagatcctaggcctacaagctccaatggagcttacaacacg

SEQ ID NO: 18328 - DNA, 465 bp, Glycine max
  unsure at all n locations
tagtaaagctaagcactaacaatctcccnctttgtcatattttgtctaaaacatacttagacacttcctgagcaggtacgagcagttatgcaagtgggatcagcaacttccattatcagagtaatcaagcacagcggaatctgtagtctagacaagttgcaagtcgtttccaggatgtcaagacatctcacatgacatctgctttctgcttctgctccccctgtctccatgcttactgcaacatcttctatcagctactagtcttctccaggatgtcaagacgtctcctgtgacatcagctatctgctccccctgtctccatgctcttactgcagcatcttctaatancttccatcagtcatcatcagcagcagcagtctccccctcanaatcgtatacatacaactccncctcanaatcatgaatcatgcatacatcgtatcctactgccatacatcatacata

SEQ ID NO: 18329 - DNA, 455 bp, Glycine max
  unsure at all n locations
agaacatgatgcccaaaagcacgtcggttatattaccttntaatgcttcccatctaaggccaagttccatggtggaccgtgccttcgacggcacccgccgggaggtgaggggggagatcgacctcccagtacagatagggcctcacacctgccaggttacattccaagtgatggatatcaagccgacctacaactatcttttggggcgtccatggatccactcagtgggataatacagccaattacgctctgctttccttcatggacgggttctttggctacaatcagataaagatggcgccagaggatatggaaaagaccaccttcgtcaccctgtgggggatgttctgctataaagtgatgtcgtttgggctcaagaacgccggggcaacctatcagcgggctatgatggctgagntccacgacatgatgcaccgagaaatcgaagtctatgt

SEQ ID NO: 18330 - DNA, 435 bp, Glycine max
  unsure at all n locations
ntaagagcaattcctttctttnncttattattctcattatgttgatncaancncattagttccatttcatgttcctgtaactttccaaataaagtagcaagagacatgttagatagatctcatgattcaataatggttgttaccttgggttgtcattccctacttaagcatctcaaaactttattgataagatcttcatttgaaaatatttttcctaaagatgcaagatgattaattatgtgtgtgaatctcttttgcatgtcctgtttgctttcatttggattcattctaaataattcatattcatgagttaatgtatttatcctagatctttttacatttgttgtaccttcatgtgttacttgtcgggtatcccacatatcttgtacacttttacaatgtgataccctaaagtgcttattcattcctaaaaca

SEQ ID NO: 18331 - DNA, 399 bp, Glycine max
  unsure at all n locations
agtttaaggaggagtatggttagtaacacataattttacatattttgattggtgggaggggttcgaattggtctctatattaacagttctgtattttcttgtaggaattgagccctggacttttactcagaagttaggagatgctgttttcattccagctggttgtcctcaccaagtcagaaatctgaaggtaaagtgaacatacctggtgaatttgtttcatatttattgtaggcacaatatattgttttcttagaagtgtaggcataatagtatctttggctactacctgaaattaagcctatgtccttcattagcaaagcaagcctttgtagaaagtgaaaactgttgattcatctanaagtttcagttcacttgtgtattntttaacacatttga

SEQ ID NO: 18332 - DNA, 429 bp, Glycine max
  unsure at all n locations
tgcactgcccanagaggacaactcttcataatacgtttgaaccaccattgatgtcccttatgatgtcgttcagtatctcaaaaaagcctacgatgatttggaagaacccttgacctgttttctcaaatcttccaaagttgattggcatttctatgacccatatatgttacagttaccaaaaaggttcaaagagaaaaccaaatggtgtggaatagtaagccccggttgggcaccatagttgaaggtattgagccacaaggcagttggtggggttttgactcactctggttggacctctgtggtggaggttgtttagaatgaaaaacctctagttttgttaatgtttcttgcagaccacggattgaactccagggtgttggaagtgaagaagatggggtattcaattcctaaggatgaacaagatggatc

SEQ ID NO: 18333 - DNA, 400 bp, Glycine max
  unsure at all n locations
agcttgtttgcacgaatttaatttaataacttactttttacaaattattttaagtatcttgtgaaaataagttacttaaaataaattatatgttataagttttttttcaatttcattgttcactaatctatttgaaacttcattttcttcttttacttaattttaaaaaaaaattattatttcaacattcttacaaacactttgaattaatcttttatgtcatttgatatttatcacttaacttatcaattaatcttactaaatacttttaattaaataagttagtttataaacttctagctattcaactcctaagttatagcttataataggggtgttcgtgagccagttccggaccagttttgaccaaatttangatctaacctaatcacaattgatc

SEQ ID NO: 18334 - DNA, 441 bp, Glycine max
  unsure at all n locations
tgaaggtgcgtaccccaccattntttcatagcaaattattgattatgtgtttactatcatagctatcatttctttctccgtcattgagggaaccacttgggctgccaaatccctccacctttgggcgtattctttgaaagatccatgccccctcttgcatatgctctgtagttgcatcctatccggagccatatcagaattgtactaatactgcctaacgaagtcaaccattacgtccttccaagaatggactcgggaaggttccaagttaatgtaccaggtaacagctaccccagtaagactttcttggaagaaatgtatcaccagttcctcatcttttgtgtatgcccacatcttccgacaatacatctttagatggttcttggggcaagtagctcccttgtacttatcaaagtctggcaccttgaacttgtgatgggt

SEQ ID NO: 18335 - DNA, 443 bp, Glycine max
  unsure at all n locations
ntaagagcaattcctttctttntcttatcattctccttatgtatattcaatctcattagttccatttcatgttcctgtaactttccaaataaagtagcaagagacatgttagatagatctcatgattcaataatggttgttaccttgggttgtcattccctacttaagcatctcaaaactttattgataagatcttcatttgaaaatatttttcctaaagatgcaagatgattaattatgtgtgtgaatctcttttgcatgtcctgtttgctttcattaggattcattctaaataattcatattcatgagttaatgtatttatcctagatctttctacatttgttgtaccttcatgtgctacttgtcgggtatcccacatatcttttacacttttacaatttgataccctacagtgcttattcattcctaaaacagatgtaat

SEQ ID NO: 18336 - DNA, 406 bp, Glycine max
agcttcaacattcaacttcgagcttctcgttatattataggactcaattagacatccgagtaaaaagttattgtcgtttgaatttgctcagagcttcaacattcaatttcgagcgtctccatatattacgggactcaatcagacatccgagtaaaacgttattgttgtttgaatttgctcaaagcttcaacattcaatttcgagcgtctagatatattacaggactcaatcaaacatccgagtaaaatgttactgtcgtttaaatttgcttagctctccagctttaaatttcgagcgtctcgatatatgacgggactatatcagacatccgagtaaaaagttattgtcatttgaatttgcttagagattcaacattcatcttcgagtgtctcgttatattacggga

SEQ ID NO: 18337 - DNA, 451 bp, Glycine max
  unsure at all n locations
ctcaagctntgagcaaattcaaacaacaataactttntactcagatgtctttttgcgttccgtaatatatcgagacgctcgaaattgaatgttgaagctctgagccaattcacacgacaataactttttactcggatgattgattgagtcccgtaatataacaagacgctcaaaattgaatgttgaagctatgagccaattcaaatgacaataactttttactcggatgtctgattgagtcccgaaatatatcgagacgctcgaaattgaatgttgaacctctgagccaattcaaacgacaataactttttactcggatgtctgattgagtcccgtaatatatcgagacgctcgaaattgaatgttgaagctttaggcaaattcaaacgacaataactntttactcggatgtctgattgagtcccgtaatatatcaagacgctcgaaattg

SEQ ID NO: 18338 - DNA, 444 bp, Glycine max
tatagctctagcagccaggttgtaaagatgatatctcttcctcttgcattaattgtcactcaagatgctagccagtggatccctcctgagattggtcaagttgatgtcagttgtgatgcttcagttccttaattggggagtctcacaacttatggtggggtgcttcatgattatacatgaaattttctgtgtggactcaaatccaatattggagattcatctgtgctgaatgtacaattgttgactattctaatgaatcttgcctatgaaattctatttccttttaggaatggatcatggaatagtgggaaaagaactattacattacttctattgtaggggctaataatgggagctctatcatggtgatgtcaaaaggtttgttttataaaagtgaactacttttggaatctgatctttattgctgagatattacttttatac

SEQ ID NO: 18339 - DNA, 442 bp, Glycine max
  unsure at all n locations
tctaatagtatatcaaaagagagaaatgttagcaactttctcttttaacactttnttgaacacactttctagtttctactatgaaatttattgaaaatcacaaaatttttgcaggtcttacttctcatttaatgattctctctcctgattttatggtttccaatagatttcaaccaatagtgaagtgttacaaagattaacctaacctttcttgctttctcagcatacatcaagaagaggattatgtacacaagctgaaaggctgctccaatagaattaacagttgtcaccaagagattatcaggtgatataaggagtgtgccataccacaagcagatcatgcagttcaagagagaataaatatatggcaacccggagaacatatctgttgacccatttcggatgattctcctaaatgtcggtctacaaatcaaaacagaac

SEQ ID NO: 18340 - DNA, 248 bp, Glycine max
agcttgtgattataaaggcaaattttcactgtgattttttctctctgtttcttcttctggccatgaaacttctctttgtcacttgttgaatgagccccacttaaaaagtttgaattttgaggagaattatctttctgggtgtttttcacgagagcaagatcttgaagttcttggggtttatgtggaatcctctgtcttgggttatggacgctgctgctataatggcaattgcacttgcccttggaggg

SEQ ID NO: 18341 - DNA, 436 bp, Glycine max
  unsure at all n locations
cttgcctgaagcatatcgcaaaaatgggagaaaattacatatatttttgcaaccatttaaggagaaattaaacaatgcacatatatatacctgatgacatgtgtattgaactcagcggtaactttcatggggttcggcttgtaagcttgttttgcggcttctcttgcttcttttaatcgcctatgccagacatgatcgaagtgacctatgttagcgttaagggtagggaatatagcaagacaaattacgtaaaagaatagcaaactgaacttgctagtttccatgactattgtttctttctcttgaagatctttaatcgtgtgcgccttatgttgtttattgtgtgcttttcaacctatatatntatttattttggcattttaagttctcctcccgtactttgcgctagacccacatataaatggcactacgatac

SEQ ID NO: 18342 - DNA, 463 bp, Glycine max
  unsure at all n locations
acactatggaaaactcccgcttgccttgccccttgatatattngagggacttatggatactatgaatgacaaattccttgggataaaggtattgttgccatgttttcaaagcccgtactaaggcatacaactccttatcataagttgaatagttaagggtaggaccacttaacttttcactaaaataagcaattggatggccttcttgcatcaacacagccccaatcccaacatttgaagcatcacactcaatttcaaaagatttttgaaagtttggcaacgcaagtatgggggcattagttagcttttgcttaagaacattgaaagcttcttcttgtttctctccccatttgaaaccaacatttttcttgagcacttcattgagaggtgctgccaatgtgctaaaatccttcacaaatcgtctataaaaacttgctaagccatgaaaactcctcacctcggg

SEQ ID NO: 18343 - DNA, 379 bp, Glycine max
agcttgtcttcaacaaataaatcataatcaaatttgtgatcttcaaagcccaactccagcttctttctccccatatccactatgcagctcgcagttagcatgaatggccttcccaatattacaggaatgtcattatcttcacagatatccattaccacagagtctgcctgttttactctgaccagcacatcttcaattactccatatggtctggaaatggagcggtcaacaagttgtaaagtcatcctagtgagcatgatctcctactctcccaaccttttgcacatggagagtggcatatagctaatactggctcccatgtcaataagagcctttccacagtgacttcttcaattgaataaggaatggttacactccc

SEQ ID NO: 18344 - DNA, 378 bp, Glycine max
agttctggtgggacatcttgacttgctttccaatctgacattcaccacagattctgccttcttctattttcagattgggaatgcctctaacagcacctttgtcaatgattttcttcatgcctcttaagtgcagatgtccaaatctttgatgccatattttgacttcatcttctttggagaatagacatgtggaggagtaactggtttcttgaggtgtccataggtaacagttgtcctttgacctgctgcccttcattagaacttcactcttctcatttgtcaccaagcattctgactttgtgaagtttacattatatccttcatcacacagctgactgatgctgatcaagtctgcagtcagtccttcacagcagtact

SEQ ID NO: 18345 - DNA, 437 bp, Glycine max
  unsure at all n locations
ttgaagtactacgaagcagcaaatgaagaggacctcttctaatctcatgctncatcaaattagtctcagcttcaaatttggatacatgtgtgcaaacagagccattgcacaagctatgagagacgaagacataattcatataattgacttccatattgatgaaggaagccagtggctcacttagattcaggattttgtagctaggtctagggggccactccacatccggattacggctattggtgattcaacatcatctgatgcaatgcagatggtgggaaataagttatcaaaacttgctgaggaatttaaggtgctctntgaatttgatgttgtagctatctttgcttgtgatgttcagctacaaaaccttcgagttcaatctcgggtggctctggctgtgatatttgcattcatgctacatcagatgccggatg

SEQ ID NO: 18346 - DNA, 401 bp, Glycine max
agcttcttcataaacgtgacatttttgcacaatacacaatgtccggtacaccacaaccaaatggtgtatcagaaaggcacaatagaactttaatggatatgattaggagtatgttaatcaattagactatatccgtatctttgtggatgtatgccttgaaaactgtcatgtatttgttgaataaggttcctagtaaggcagttccaaagacatcttttgaactgtggacaaataggacacctagtataaggcacttgcatgtttggggttgtcaggcacaaataaagatctataatccgcacgaaagaaaattggatgcaagaacaatcagtggatatttcattggttatcaagaaaagtcaaaggagtatatgttttattgtcctaaccatagtatgaga

SEQ ID NO: 18347 - DNA, 450 bp, Glycine max
  unsure at all n locations
cgcttagcatcagaccacttccagggtactggaactacttcacatggacttgatggggcctatgcaagttgaaagccttggaggaaagaggtatgcctatgttgttgcggatgatttctccagatttacctgggtcaactttatcagagagaaatcagacacctttgaagtattcaaagagttgagtctaagacttcaaagagaaaaagactgtgtcatcaagagaattaggagtgatcatggcagagagtttgaaaacagcaggtttactgaattctgcacatctgaaggcatcactcatgagttctctgcagccattacaccacaacaaaatggcatagttgaaaggaaaaacacgaccttgcaagaggctgctanggtcatgcttcatgccaaagaacttccctataatctctgggctgaagccatgaacacagcatgctacatcca

SEQ ID NO: 18348 - DNA, 395 bp, Glycine max
agcttctaaactttattttagaatgaagctctgataccacttgttagacaagtggcctcagatatcttaagaaggggggggttgaattaagatatcccaaattactttccacaattaaaaatttatttcactttcttttcaagttatagattcccttaacaatgaacttcttaaatattaattcaaataaaacaatttgaatatgaatgtaaagcaataataaacaaaggaggttaagggaagagaaagtgcaaactcagatttatattggttcggccacacccttgtgcctacgtccagtccccaagcaatccgcttgagagttctactatcttgtaaattccttttacaagttctaaacacacaaggacaatccttcctttgtgtttagaatt

SEQ ID NO: 18349 - DNA, 356 bp, Glycine max
agcttataatatatcgaggcgctcgaaattgaacaacggaagctcttgagaaattcaaatggtcataacttttaactcggatgtccaattcatgcgcatcacatatagagacgctaaaaaatgaacaacggaagctctccagaagttaaaatggtattaagttttcacactgaggtccgattcaggcttataatatatcggggcgctcgacattgaacaacggaagctcttgagagattcaaatagtcataacgtttaactctgatgtacgattcatgcgcattacatatatagacgctaaaaaatgatcaacagaagctcttaagaaatataaatggtcacaagttttgacactg

SEQ ID NO: 18350 - DNA, 375 bp, Glycine max
  unsure at all n locations
agtttattaattnttgtaattaggtttttagtttgaagttattttaataatgcttaattatttacaagcctttgttcatgggtggacagaccttacaaataattacccgattcccttctagttttatgaagttagaatgaaattttaatctgtagtttaagtttaagtttaagttagtagataaataaaactgggtaattttgaatatattctatagataaattaaaatacatgtgaagaaaaatttaaataaataatttttttttctacaactaacaaataaataattaaataaaatatggactaacaaattatttataatacaaacaaatattgaaaaaattatttacacaatatatatacaataataataat

SEQ ID NO: 18351 - DNA, 355 bp, Glycine max
gtgtaatcgattacacacatacttacaactttcacatttagagagccgcagaaaacattctcaacagccacatctttttattcggttcttgaatggccatcaaaggcatatatatatgtgacttgagacacgaatttgataagagattttcaaaacaaaaaggtcttatcctcttatatagcaaaatacctttatcctcttacatattccttggccaaaactcttttgattcaataaggaattatctgagtgctcacatcgctcaatctatctctttatacagagatttcttcttctcttcttcattctgaaaagggattatagagaccgatggtctcttgttgtgaaaggattc

SEQ ID NO: 18352 - DNA, 433 bp, Glycine max
  unsure at all n locations
ttgaagaganagcacccagttatgatctttttgtgttctttgaaaaagcctatgacactgtatcctggtccttcttggattatatgctatctaagttaggtttctgtactaaatggagacaatggattgctgcctgtctccaatcagcatccttttccatcttagttaatggtagccctactaaagaatttgtccctactcgtggtttgagacaaggggaccccttagcgccattgcttttcaatatagtgggggagggtctcactggtttgatgagagaggccattctgaaaaatctctatcgcagctaccatgtggggaatcataaggagcctattaatatccttcaatatgctgatgatactgtttctattgcggaagcttcttgggagaatgtccttgccatgaaggcaatgcttaaaggttttgagat

SEQ ID NO: 18353 - DNA, 382 bp, Glycine max
cttctggcttcaattcttcagtgggctttccttctgtgtccagcatcttgggatgttcccagcctttgatgacagctttccaggttctgctatccagtgatttgaggaaggccaccattcttgctttccaatattcatagttgcttccatcgagaattggtggtctgttcactggtccgccttctttctccatgttcatcagaatttatctccctagatctcactctgtgatttcgagtgttggctctgataccaattgaaattctgataccaggggacagatgtcgtacaggatgtcacgacatcacgcttcagaacatgcagattatatgtgtccgtatgaacagattacacaagtaaataacacaagagaattgttacc

SEQ ID NO: 18354 - DNA, 448 bp, Glycine max
tcaagcttgcactgcccaaagtggacaaccttccagaaaacgttgaagctttcattgttgtcccttatgatggcgttcagtatctcaaaaaagcctacgatgatttggaagaacccttgacctgttttctcaaatcttccaaagttgattggcatttctatgacccatatatgttacagttaccaaaaaggttcaaagagaaaaccaaatggtgtggaatagtaagccccggttgggcaccatagttgaaggtattgagccacaaggcagttggtggggttttgactcactctggttggacctctgtggtggaggttgtttagaatgaaaaacctctagttttgttaatgtttcttgcagaccacggattgaactcgagggtgttggaagtgaagaagatggggtattcaattcctaaggatgaacaagatggatcattcacgagtga

SEQ ID NO: 18355 - DNA, 444 bp, Glycine max
tgaaggagaactagatgcattggttaacttggtaacctagcatgccttgtatcagaaatttgtacctgtcgcaagagtctgtggtttgtgctcctctgcagaccaccatacagacctttgcccttccatgtagcaacctggagcaaatgagcagcccgaagcttatgttgcaaacatttacaatagacctcctcaacctcagcagcaaaatcaaccacaacagaacaattatgacctcttcagcaacagatacaaccctggatggaggaatcaccctaatctcagatggtctagccctcagcaacaacaacagcagcctgctccttccttcaaaaatgttgttggcccaagcataccatacatttctccaccaatccaacaacagcaacagccctagaaacagccaacagttgaggctcctccacaaccttccctcgaagaact

SEQ ID NO: 18356 - DNA, 385 bp, Glycine max
agttttgcataccccattgatccattaggaaattacttatgaaagagagccatgagggtgggctcatgggccactttgggatagacaagacccttgtcttactcaaagaaaagttttattggccccatatgaagaaagatgtccataagcattgcactatgtgtgtggcttgtttacaagccaagtctagggtgatgcctcatgggctatacacacctttacccatcccatctgcaccttgtgtagacattagtatggactctgtccttgggcttcctagatcccaaagaggtgtagactctatctttgtggtggtggataggttctgcatgatggcacactctatactatgccataccgtggatgatgcttccacatctcaaac

SEQ ID NO: 18357 - DNA, 399 bp, Glycine max
agcttcttagtttcagatgatgcagatgagcttgtagctacctcatgcactcctctaatgaccatggcatcatttatggcgctaaattgctgggagttggaagccatcttctcaatcaagtttctggcttcagcaggagtcatgtctccacgggctccactactagcagcatctatcatacttctctccatattactgagtccttcataaaaatattggagaagaagctgctccgaaatctgatggtgagggcaattggcacatagctttttaaatctctcccagtattcatataggctttctccactgagttgactaatacctgagatatccttcctgatggtcgtagacctagaagcacggaaatatttctctaagaatactctcttaaggtcatcc

SEQ ID NO: 18358 - DNA, 438 bp, Glycine max
  unsure at all n locations
tctcagccaacttgcttcctcactagcagttgctagtgctatcatctcatattccatagtggactgagctaagatagtctgcttctttgacttccaagaaacagccccaccagctatgctaaatatatagccgctggttgctttggaatcatctgaaagggtgttccaatctgcatcgttgtatccttcaagtataacaagaaaccttttataatgtaatccaaggtttatggttcttttaaggtacctcattaccctttcaatagcgtgccagtgctccatactangtctactggtaaacctgcataataatcccacaacataggctatgtcgggtctagtacaatcagtggcatacctaaggctgccaatgatacttgcatactcagtttgtcgtatacattcaccagtgttcttaaaccaatttacacttggatc

SEQ ID NO: 18359 - DNA, 437 bp, Glycine max
  unsure at all n locations
ttgacctanatttgaacaaaaggaaatcgttaagttatttattgtcaagantagatggtgatgataaagatgaagaagaagcggaaaggttattattaatgtacgttccggtgagggaaatcaaagtaaagggtccaaaaacaacgaaagtagaagtgtcaggaagagtttggcagagagtggcttccaagatagacccagatgcacattgcactgtgatgctaacttgacaatggcgcgcaaattggaccacggcctcaataacatcagaatttttcgggacttgaatgaagatgggtttcaaggcaagatcgctatcttggttaataacgaggggtatttttggcttgttcttggatccaaggggcctaccacaacctttgtttgaggatggtggcatttggtgagaggaagatccaatataattatgaacagtg

SEQ ID NO: 18360 - DNA, 339 bp, Glycine max
agtttgaatcggacctcagtgtgaaaagttatgaccatttgaatttctcgagagcttccgtggttcaattccgagcatctcgacatattatgtgcccgaatctgaccttcgtgtgaaaagttatgaccatttgaatttctcgagagcttccgatgtgtaatttcgagcgactcaatatattgtaagcctgaatcggagctcagtgtgaaaagttatgaccatctgtattgctcgaatgcttccttggttcattttcgagcatctcgacatattatgtgcccgaatttgaccttcgtgtgaacagctatgaccatttgaattctcgagagcttccgttgt

SEQ ID NO: 18361 - DNA, 354 bp, Glycine max
  unsure at all n locations
agctnattgatttaaataaagcctagaaaaataggaataattaaggaaatcaaagctaattaatgaaagctaattgaggaaagaatgactaattgaggaaattagagctaattaaggaaaacaaattaattgaggaaagaatggttatttgatgaaaatatggctaattaaggaaaaaagattaattaacgaaaacaagttaattaaggaaagaagaataattgagaaaaaacatgattaattaaggaactaaagacagacttagtgcaagaagcccactaatctgcacctataaaagaagaagagataagaacgaaaagaccaaaaatttctaccgaatacaattcttatata

SEQ ID NO: 18362 - DNA, 401 bp, Glycine max
agtctttgcttagaaaaatgcagaaaccaaaaaatacccctggttttcatacagccgttgtccatcgaggtactgaacaaaaccatcaatgagatatggaccaacataagaagccaaagtgtttaacaatacaagaaaagctgtgataagaatctccttccatgctgaaattattaacgatttcaccaacttcagtgtggtgacactattaattccaccacaatcagcctcaactttctctctgaaagttggaaaagcaccaattacactatctctgctgtctagttgaggaacatcctcaaggtccagggtcttcttattaccaacggctataagaggacccacccaagagaaggtaagaatgctcaaaattccagcatatgagaaaggcgtaactgagt

SEQ ID NO: 18363 - DNA, 423 bp, Glycine max
  unsure at all n locations
atgatatatgtgagggactcaggatcactagtaattataaattccttgcgataaaggcagtgtggccttgttatcaaagcccgtacttaggcatacaactcctaatcataagttgaatatgtaaaggtatgaccacttagctgttcactaatataagcaattggatggccttcttgcatcaacacagcctcaatcccaacatttgaagcatcacactcaatttcaaaagatttttgaaagtttggcaacgctagtatggaggcattagttagcttttgcttaagaacattgtaagctgctacttgtttctctccccatatgaaaccaacattttccttgagcacttcattgagaggtgctgncaatgtgcttaaatcctcacaaatcgctataaaacttgcttaccatgtgtcgaactacctt

SEQ ID NO: 18364 - DNA, 318 bp, Glycine max
acgaggccaaaagctatcggtcgtcttagcctacaagcattccatgtccatgaagatggtgacaatatgtatgaacgatggatcgaccgatctaagaattttctccataaatcttaccttatcaagccgtgtacccatctctctagctgactggagattgctcagactctccagaaatagtgagagaagaactctctttatctcatatgcagggctgcgcactccactgttaaagggtgaagatgcaccttctcgacttgtgttgtgccacaggtcgacatagcattcagaacagcgcgtgtctaatctacgcagact

SEQ ID NO: 18365 - DNA, 385 bp, Glycine max
  unsure at all n locations
tcgattacacacatactgtaatcgattaccagaggagaatttcatanaatattctcaacagtcacatcgtttcgtttgggttcttgattgaccatcaaaggcctatatatatgtgacttgagacacaattttttaaagagttttcaaaacaacaagtgttaatctctcaaaaagcaaaatcgtttatcctcttaagaattccttgccaattcaatgcaattcataaggaatcattgagtgctcagattgtaaactatctcttcaagagagatcattcttcttctcntctgatcactaaggataagaaccgaggtctttgtgtaaaaattctacacanagaagattgtcttgggttaaactgtaaagaattacaagatagtgaact

SEQ ID NO: 18366 - DNA, 403 bp, Glycine max
agctttatttccaaaatcacatctacaggaccaaggtccttcatatcaaaattattagactagaaaaacttcacatcatttatggaatgtatattactaccaaatatcaatatgttatccacatacaaacataaaatggcacatccattatcatcaaattgtttcactacacacatttatcactattattaatttgaaaataatacgaaagaataacttgatcaaacttttcatgtcattgctttggagcttgttttaagtcatataaagatttaacaaccaagaatctataagtagtactaagcaaagaatatccaacaaaaacataattaacagtttatggtccaatttttgcttttcttattaatagggaatgttaaccttgctagacacccccacactt

SEQ ID NO: 18367 - DNA, 454 bp, Glycine max
  unsure at all n locations
gcttaaatctagttttaattataaattactacaagaaaattatgttatatattattttactgcaaactaagaaataaaaaaattactttaaagtaaaaatctacttctaattaaagattacttaaaaaaaattatcatataaattattttactggaaactacaaaataaactataaatctaatttaattataaaattaataaaaactatacattcaaactgctataaataattacttacataaaattataacaaaaatgtattatcaattacaattattttgattgttatataatttttttcatatttaccaacttttttcaggactcaattnttttttatttaaataaatatcatgacatattccttttcttttatacacacaaacaagggatataaaatataaaattcatttaattaaaaaattattaacaactataaattcaaactggtct

SEQ ID NO: 18368 - DNA, 397 bp, Glycine max
  unsure at all n locations
gtcttatgaattctttcaaattaataagagaattgtatgttatcacatctggttcacatcctgcatctttcatttcctcaaacacagtgactgctccagttaacatccctacctttccatacccataaatgagaggattataggtgacaatgtctggcctaagacccagagctttcatttcttcaaataaactcctggcagtttctatgcccccttctctggccagacagcctatcactatattatacgtaaaaactgagggcgaaaggccagccacaaccatgtccttgaaaaggcttaatgccaattcccctttgcttgattttgaaagcctgtgaagaagatcattacaagacctcacttttggcagaaccatgaactngttcttcttccaaaa

SEQ ID NO: 18369 - DNA, 120 bp, Glycine max
ctagttcactacttctagtagttcaagatatgcttctagaggatttctgttgccaaaaagttactctcaggccaagaagatactatgtccgatgggtatggagtattataagattcatgc

SEQ ID NO: 18370 - DNA, 394 bp, Glycine max
  unsure at all n locations
agcttgtangtatatagagatgaatgaagggagagagagagaagagcatgaaattttgtgctctaaaagagctctgaaatctgaagttaatattcaaatgatcaaagttgaaaaaaaatgcacacacatgacctctatttatagcctaagtgtcacacaaaattggagggaaatttgaatttcaattcaaatttcactttaatttgaaattgaatttgtggagccaaactttggagccaaaatttcactaattatgattagtgaattttagttatggttcagcctactaatccaagatcaattccaagattctccacttagtgtgcttacgtgtaatgaggcatgtaaagcatgaacgacatgcacatagtgtgactatatgatgtggcaatgg

SEQ ID NO: 18371 - DNA, 451 bp, Glycine max
  unsure at all n locations
tcttctgctcaacagtatatagccgttcatggctcctttccattctattaccctccaatgccttatgtgccaaatgctggaatccaagccaccattgctccttcagctccttctcaagccaacatagctactgctagttcagcaccttcaaacagatggaatccggattctagtgcatcccaccatgtcaccaatgtttctcaaaatatacagcaattaacaccttttgaagggtcagaccagataacacttggtaatggacagctccttgacattaactccacaggtctaacttcatttcaatctcctttaaaccctacgtttcctctaattcttagcaatttgctatatgttccttcaattactaaaattcttattagtgtgagttagttttgtaaggataatctagttaattntgaatttcatcctaccttctgttaggtgaaatcat

SEQ ID NO: 18372 - DNA, 393 bp, Glycine max
agctttgtatattgggtgaagcacgctaagatgtcggtgtgttgctatgacgaatggctccatcgccgcatgagtatttaacctatgaagaaatcaaaagtaattaatatacacttgagagagagggattagagattgaatttatctatatatgttgatatatagcaatgaaaatgaaaatgaaaatttataccaatggctcatgagttgatggtagcaagagtcatttacgatgacataagctttggctagtagccaaattgtgctctcaacaccttccttagcaggtaagacgacttgactgacggcagctgacagatccccagcagaatgtggcaaacttaattcgatggccactggctttaaagttccatcttctctcaataaaaggat

SEQ ID NO: 18373 - DNA, 399 bp, Glycine max
agttttctaatggtatgcctaccccttcacctaataatatttgcaaactgaaacgctctttatatggattaaaacaggcaccaagagtatggtttgaaaagtttcgctcgacactacttgtttttgaattcactcaaagtcaggatgatacctctcttttcctacacaggactcctaaaggcatcatggagcttcttgtttatgtggatgacattgtggtcactggctcagatcaagatgctgtttctagaacaaaaaatcacctgcattcaacctttcagatgaaagacttaggccatctcacttatttcttgggtttagaggcgcattataatcaccaaggcatttctctatgtcaacacaagcatattcaaaactgggtccactagctggactccc

SEQ ID NO: 18374 - DNA, 443 bp, Glycine max
tatggtgtcgctcatgttcttggtttccctcacctacatgtgtttatactctaaagctggtttccacgtccacatcatcaagcacgtgcagccacgctcctttcatcatcaaccacctcttcccttcctcaaacgtaacggagtggccgtcttcatcccaaacttcccgcaccggaaaggggaaacggccggtgcgccagaaaacggagctccgccacctggtgttcggaatcgcggcgtcatcgaagctatgggagcacagaaagaactacataaagacttggtacaagaaggacaagatgaggggagtggtgtggctggacgatcgcgtgaagacgaacccaaaggaagggttgccaccaacgaaggtgtccaccgacacctcgaatttcgtatacaccaacaagctggggcaccgctccgcgattcgaatctcccgcatc

SEQ ID NO: 18375 - DNA, 405 bp, Glycine max
agcttgagaaactcaattagcataaatagataatataagagaatataatcacaattatcataccattaaaaatataattaagcctaatgataagaatttgattttgtattgtcaaggtaaaatttatacgatcaatctataaaaaaacattttaaatatataacggtgtacgtatgtttaaatcacaacattgttaatgtatcataattaaattcaaattatgatttcaaagagtatatgttattgatattcttttaggtttgggtggataagaaacatgaggaaaggaagaaagcattatggaggtggccaatgggttgttaaactagttagggtaaatagtcacttttatctttaaatgaatataaaatttagtttttgatagtgtaaaaagtgcgataaata

SEQ ID NO: 18376 - DNA, 435 bp, Glycine max
  unsure at all n locations
tatccagaagaacttctaggagaagaaaaaaatgaaatgatcttttctataagtgaaaattatcttatgtacaagaataattgtagaaattctctcatctttagagaaactagatgacaagtttctaccaacttagggggagccctagcagatataaaaaaaagttggaaagttaaattatctcacaatgataataacatacatttcctttcatgttaatgctgtcagtcaatttctcaatgcaccatgtgatagtcattggtatgtagttgttcagatcctgagatgcatcaaaggattacctggcaaagggcttattgatatgaacaaggctaacatcattgtacatacaaatgcaaattgggaaagagatgctagtgatagaatatccacgataggctattgtgttcttattggtggngacttgatattgag

SEQ ID NO: 18377 - DNA, 404 bp, Glycine max
  unsure at all n locations
agcttatctatcactttgtacatgcagcctatcaaggatattggtctataatcatttagggactgaggatggttaactttggggataagagccaagaaagaggcattgctgcctctagggaaacaaccgttgacatggaactcatccacaaatcttctgaactctggttttagcacactccagaattccttaataaaattgaaattaaaaccgtccggcccagggcacttatctccaccacaactccacactgcttccttaagctcctggtctgagaaaggtaaaattaaaccctccctctgcctttgatcaagagaagggaattgaactccatcaagggtaggcctagagggattctgctcagaanatctgttgagaaagaagttcacagcgcctatcttcac

SEQ ID NO: 18378 - DNA, 399 bp, Glycine max
agcttgcttcttctgaatatcaaatgcattttgggaaaaagaaatagacaaattaggattggttagaagagcactaactgaaattaaattgaatttgaatttaggaatgtaggcaacattatgcaagagtaaggtattggttaagcaaactgaactaatggcaatgataggtataacatcattgttaggcagagtgacagttttatcagaaacaagttggtaagaccgaaaatgatgaagggaacaagaaatatgaatgctggcaccagaatctaaaagccaacaatcatgaagaaaattagaagtggatgtagaaaggatcataccactggcagaagaacaccttgagggatgaaacattggagcatgacttctaaaagattatcaattggtatattg

SEQ ID NO: 18379 - DNA, 391 bp, Glycine max
agcttgtactcttgttattggccgtgacgaagagattagaagggttgtgaggattctatcacggaggactaagaacaacccggttctcattggagaaccgggtgtgggaaaaactgcggttgtggaagggttggcacagaggatagtaagaggggatgttccaagcaaccttgctgatgtgaggcttattgcgttggatatgggggcgttggtcgcgggtgccaagtatagaggcgagtttgaggagcggttaaaggctgttttgaaggaagtggaggaggctgaggggaaggtgatactcttcattgatgagattcatttggtccttggtgctggtagaactgaaggctccatggatgctgctaatctattcaaacctatgcttgctcgc

SEQ ID NO: 18380 - DNA, 406 bp, Glycine max
agctttccttcctcattatcatccttgttaccttgctcaatttttcaacaagtcacgcacaagacgaccctttttacctttaccaatattgctcaagcaacagaaccactgccaacacctccttccaaataaacctcagaaccctcctctcttccctttcatctcacgccaccggcgacacccaattctacaacacaacattcaccggaaccaacccctccgacacaatctacgccatgttcatgtgtaggggcgacgtcccttctcagctttgtcaagcatgcgtcataaacgccactcaaagactctcctcagaatgctccttgtccaaagaatcggtgttttggtacgacgagtgcatggtttggtattccaccaacccgatcttcaccaccgtggccacaac

SEQ ID NO: 18381 - DNA, 442 bp, Glycine max
  unsure at all n locations
tcaagaacagctccctcttcanagcctaagtaaatatgttagcttcttgatcttttctcttatagtgtactagatcagtagttccatccttgcaaagatctcttaaaaaataaacttcacatcaatatgcttgcttcttccatgtagaattggatttcttgacaatttaatggttgaactatagtcatagaaaattgtagtagctttaatttgcttgaactacaactcctcaagaatttttctcaaccatatttggcttggcaaggtgacaattggttgctttttagatgaccacaaaacgacacctgttccaagcataaagacagaaccaaaagtgctctttctatcatctagatcacctacataatcgttgtcagttccccaaggtttcatgttccttgaaaatagtgaagaattctcttggcagccaacaaatgcaact

SEQ ID NO: 18382 - DNA, 287 bp, Glycine max
catccttgcacacatctcttaaaaaataaactccacatcaatatgcttgcttcttccatggagaatcggatctcttgacaatctaatggctgaactatattcatagaaaattgtagtagctttaatttgcttgaactacaactcctcatgaatttttctcaaccatatttggcttggcaaggtgactattggttgctttctagatgaccacaaaacgacacctgttccaagcattaagacagaaccaatagtgctctttctatcatctagaccacctacataatcgt

SEQ ID NO: 18383 - DNA, 377 bp, Glycine max
ccaagccaatcataatgctagacaaaatatagatgttattataggtaacaatggcggtaatgacggaccgaggcagaaccgggttaagggagtaaagctcaatgttcctcccttcaaaggcagaagtgatccagatgcctacctggactgggaaattaatattgagcacgtatttgcctgcaatgactacactgatgtgcataaagtcaagctaacagcagctgaattctccgactatgcccttgtttggtggcataaataccatagagaaatgttgagagaggaacgaccagaggtagatacatggactgagatgacaagggtgatgagaaaaaggtatgtgcccactagctataacaaaaccatgcgacagaaac

SEQ ID NO: 18384 - DNA, 397 bp, Glycine max
tcttctttagtttaggtcccatgaatgtttatttcttggctattccacttctcacaaaggctacaagtgtctctcacctaatggaaaactgtatgtttccaaagatgttgtctttaatgagcttaaatatccttacaatgatgtttttccatccttatccaactctgtcactccatctaagagtaactttttaccaactgctcatattcccattgtttcaccttctcctaatgaacccagtcttccctctcaaactgctgaaactaatcctccttctataaatgctgaccctcctattgccctaaatgctgaatgcaccaattcccaaaatgtcacactatcttcttcctctttgactgctgaaccaacttctgtaaatgatgaacactctaacact

SEQ ID NO: 18385 - DNA, 377 bp, Glycine max
ttgtcttttaggattaaagtctcacgattgtcacatgttgatgcaacaattgttagtcgtggatatacaagacatcttgccaaacaaagtcaggttagccataactcgcctgtgctttttcttccatgccatatgtagcaaagtcattgatcctgtcaagtttgatgagctggaaaatgaggctgcaattatactgtgccaatcgaagatgtattttccccctgctttctttgacatcatgattcacttgattgtgcatctgtcagagaaattaaatgtcgtggtcttgtttatttgcactggatgtacccggttgagcgatacatgaagatcttaaaagggtatacaaatgaatttatatcatccataagcattta

SEQ ID NO: 18386 - DNA, 394 bp, Glycine max
  unsure at all n locations
agcttattctatctgntaaatacaaggcatccttgccttatatagggagaggacaaaacaaaaaaaataacagaataaccttccatatggatttaggtcacagcccaataattcaccaccttgaactaacatccatataggacacaaactgctccctccaagcacacatgaacttaaccccaacaatcaacattgagcaagcttaagcggtgatcaaacttgctctttggaacaagctttatgaacatatcagcaggattgtgtagagtgctaatcttatgaactttgattcttctttctaaccgaatgaagtgatatctaacatctatatgcttggttctatcatgatgaacttgatccttggccaagcatatagcactaaggctgtcacagt

SEQ ID NO: 18387 - DNA, 405 bp, Glycine max
  unsure at all n locations
agcttctanactttgtacaagaatgaagctctgataccacttgttagacaagtggcctcagatatcttaagaagggggggttgaattaagatattccaaactgtttcccctaattaaaaatctatttctctttttactcaagttatgaattcccttaaagacaatcttcttaaatattaattcaaacgaagcaacttgaatgtgaatataaagcaataataaataaaagagattaagggaagagaaaatgcaaactcagttttatactggttcggccacacccttgtgcctacgtccagtcctcaagcaacccgcttgagagttccactaacttgtaaattccttttacaagttctaaacacacaatgacaatccttcctttgtgtttagagatcctttacaaca

SEQ ID NO: 18388 - DNA, 394 bp, Glycine max
agcttgtatggttaacgtctcacgattgacacgtgctcatgcaacaattgttaggcgtggctatacgagacatctttccaaacaaagtcggggcagccatcgctaccctatgtgacttctttcatgcgatatgtaccatagtcctggatcctgtcaagctcgatgagctataaaatgaggccgcaataatacagtgctagtaggagacgtattgtccccctgctttctttgacatcatgattcacttgattgtgcatctagtcagagaaatcaaatgatgtggacctgtacatctgctgcggatgtacccgtgagaacgatacatgaagatcttagaaggatatacacagaatctatatcgttcagaaggcattaatgatgagaggtacattgc

SEQ ID NO: 18389 - DNA, 395 bp, Glycine max
agctttaaaagattggctaagattttgttaaaacataagcacttagacaatgaaggaaagctggagttgctgcacatgatgtccaacggtatgtcaaggaataagatcgggctgcacaatgcacaaggcaagataaaatgtcaaatgaagaattgaagttgcaggatccacgatgtcggatacaatgtcctgacatcctgcccgaaaatactggagttgctgtacaatgcaagataaaagacaagtgcagaagtgaagctgcaggatccacgatgtcggatacaatgtcctgacatcctgcccgagaatactggaattgctgtacaatgcaagataaaagtcaagtgcagaagtgaagctgcaggatccacgatgtcggacacgatgtcctgaca

SEQ ID NO: 18390 - DNA, 401 bp, Glycine max
agctttatttttatgtgcttaagatgtgtatcaacagcatcatcatcgtcattctcaagaaccttctttataccaacagtaggttgggcatctcctaagtttgtaattttcaagccctttgaactgcatgagcaaaccaaaaaaaattgtttatataactataaaaattagttgtatgtaaaatttggcaatggaccaacatttacctgataaattcatacaaattgtggtactcatttctctgaatattacgaaagagatgttcttgttcagattttagtctgaagagaaggtcaaaataatgcatattggaaccaccaccagcatgccactcaaattccacatagtcaatctgataagaaaggaaaaaaaacaattaagatctccacggtgtaaatatc

SEQ ID NO: 18391 - DNA, 449 bp, Glycine max
  unsure at all n locations
actcaagcttgaaggcgtgtagtccaccatctnttcatagtagaatactggttatgttctactatcattatcatctttctccgtcattgaggtgccactngagctgccaggtctctccacctttgggcgtattctttgaaagatctgtgccccnttttgcacatgttctgttgttgcatcctatccggaaccatatcaaaatggtactgatactgcctaatgaaggcaacctttatgtccttccaagagtggactcgagaaggttccaggtcagtgtaccaagtaacagctaccccagtaagattttcttggaaggaatgtatcagcagttcctcatcttttgcgcatgcccncatcttccaataatacatctttagatggttcttgggcaagtagtccccttgtacttgtcaaagtccagcaccttgaacttgggaggggtgatgata

SEQ ID NO: 18392 - DNA, 404 bp, Glycine max
  unsure at all n locations
agcttgttcataaacgtgcatttatgtgcaatacacaattcccggtacaccacaacaaaatggtgtatcagaaaggcgtaatagaactttaatggatatgtttaggagtatgttagtcaattagactttacccgtatctttgtggatgtatgccttgaaaactgccatgtatttgttgaacagggttcctagtaaggcagttccaaagacatcttttgaactgtggacaaataggacacctagtataaggcacctgcatgtttggggttgtcaggcagaaataagaatttacaatccgcaagataaataattggatgcaagaacaatcaatgaatatttcattggttatccagaatagtcaaaggggtatantgtttattggtctaatcatagtatgagaattg

SEQ ID NO: 18393 - DNA, 386 bp, Glycine max
agcttaatgaaattttgttgggtatatcggaggacaaatacatgagattgcaagagggagttaagcaagtgcaaagacattttgtggtgaataatcccccaaagaggtatgatgtattccatatgattattcattccatatggctaaggaggttgaatgtgcgtgtgaaataagtcatcaactctattatgttctctctctattcatacttttgctaatggttttaaagtttaattgtttgaccttcaatattttgatacttaaaagataatagattcgagtataattttatcttatatgactaataatttttaatcaagagtcatctcttttgtgacttaaaataaatataacaataagagagatgactctacgaaatatgaata

SEQ ID NO: 18394 - DNA, 390 bp, Glycine max
  unsure at all n locations
tgtacggttaaagtctcacgattgtcatgtgctcatgcaactattgttagccgtggctatacgagacatcttgccaaacaaagtcaggttcacgataactcgcctgtgctttttcttccatgctatatgtagcaaagtgattgatccagtaatgtttgatgagttggaaaatgaggccgcaattatactgtgccagttagagatgtattttccccctgctttctttgacatcatgattcacttgattgtgcatctggtcagagaaatcaaatgttgtggtcctgtttatctacggtggatgtacccggttgagcgatacatgaagatcttaaaagggtatacaaagaatctatatcgtccggaagcatctatngttgagaggtacattgc

SEQ ID NO: 18395 - DNA, 458 bp, Glycine max
  unsure at all n locations
agcttcatccaactcaagcatggaaagaagacagtatataccagtcattcgtatatttctaaaagctnttcacccttatcgatgattgaaaaaagcttttaatggaagtcaggagaatgaatgccccccggatgcattaaccggaaaccaagttcatgatcgcgtaaaggacattgtaactgtgtttggcaagtcccagaagaagacatcatctcccaacatgtggaagaagcgcttaatattctttgatcttccatactggtctgatctatatgtgcgccactgtctagatgttatgcatgtggagaaaaatgtgtgtgaatatttaattggtactcttcttaacattaaaaggaagacaaaagatggtttgaaatgtcgtcaagacttggttgacatgggaatacgagagcagtngcatcccatatcacaaagtctgcgaacatatttacccctat

SEQ ID NO: 18396 - DNA, 401 bp, Glycine max
agctttttattcaatttcgagcgtctcaatatattacgggactcaatcagacatccgagtaaaaagttatcttcgtttgaattagctctgaggttcagaattcaatttcgagcgtctagatatattacgggactcaatcagacatccgagcaaaaagttattgtcgtttgaattagctcagaacttcataattcaatttcgatcgtctcaatatatttcgggactcaatcagacatctgagtaaaaaagttattgtcgtttgaatttgctgagagcttcaacattcaatttcaagcgtctcgatctattacgggactcaatcagacattcgagtaaaaagttattgtcgtttgaattcgctgagagcttcaacattcaatttagagcgtctcgatatatta

SEQ ID NO: 18397 - DNA, 272 bp, Glycine max
tatatatgtaggactgatgatcgctgtgattgacatattcctcgggataaaggtagtgttgccatgttttcaaagcctgtactaaggcatacaactccttatcataagttgaatagttaagggtaggaccacttaacttttcactaaaataagcaattggatggccttcttgcatcaacacagccccaatcccaacattggaagcatcacactcaatttcaaaagatttttgaaagtttggcaacacaagtatggggcattaagtaaccttt

SEQ ID NO: 18398 - DNA, 393 bp, Glycine max
agcttgttattgaacaagggaagctctcgagaaactcaaatgatcataacttatcacacagatgttcgattcaggcgcataatattccgagacgctcgaaattgaacaacgaatgttgttgagaaattcaaatggtcagaacttgtcacacggatgtccgattaaggcgcataatatatcaagatgctcgaaactgaacaacgaatgctcttgagaaattcaaatggtcataacttgtcacacggatgactgattcaggcgcattatatatggagacgcttgaaattgaacaacgaatgctctcgagaaattcataaggtcataacttgtcacacggaggttcgattcaagtgcataatatatcgagacgctcgaaattgaacaacgaatgct

SEQ ID NO: 18399 - DNA, 316 bp, Glycine max
  unsure at all n locations
agcttctgttgttcaatttcgagtgtcttgatatattatgcgcctgaatctgacctccgtgtgaaaacttatgaccatttgaatttctcgagagcttccgttgttcaattttgagtgtctcgatatattatacgcctgaatcggacctccgagtgaaacgttatgaccatttgaatttctcgagagattccgttgttcaatttcaagcgtctcgataactcatgcgcctgaatcagaactctgtgtgaacacttatgaccattttgaattctcgagagcttcnncgtgtcaatttcgagcgtcttcatatattatg

SEQ ID NO: 18400 - DNA, 263 bp, Glycine max
agcttctctatatattatgcgcctgaatctgatcttcgtgtgaaaagctatgaccatttgaatttctcgagagcttccgttgttcaatttcgagcgtctcgatattttatgcgcctgaatcgggcattcgagtgaaaagttatgaccatttgaatttctcgagagcttccgctgatccattaccagggtctcgattattatgtgccgaaattggaatcccattaaatgtatgacatttgaatatttgaagcttcgttgtaaat

SEQ ID NO: 18401 - DNA, 323 bp, Glycine max
agctttatgttacatataaaaacgagtctatattacctattctattatgtataaccaaaaaatattatccgcctaacatttaatactttatttatctgtaaattacattcaatttatttgcatcaacgatttttacatgcatgctatccacgaatatgatgcttgttccattggaactctcaacatatattttacattacaatcgatggaatttaattcagctaattgaaccacgacatataacatattactaacttctaatatctgattttattcttacatgtaaaaaacatatttcatatgatattacattgattcaaatg

SEQ ID NO: 18402 - DNA, 304 bp, Glycine max
tcagcttattatgcatctactgctttaaacaaaagagtgctccactacgcaacttttggtttcaacttatagttggctacgtcttatgtaaactcaacccatgtatgttttggagcattccagttaataaaaaatgtttctatacatatgtctgttgtttaaaaaaattattaagaaaagagtatgaccatagttatcaactgacatacagaaaaaaaaatggttcattggtggatcaattctataatcttataatattataataagcgagtatttaaaataggactaaaccttagcgtatgat

SEQ ID NO: 18403 - DNA, 349 bp, Glycine max
  unsure at all n locations
agcttattgtcgnttgaatttgatcaaagcttctgtattcaattttgagcctctctatttataaaggcactcaattatacatttgagtaaaaagttattgtcatttgaattttctagggtcttatgtttttaatttcaagcatctcgatatattacgggactcagtcggacatccaagtaaaaagatatggccatttgaatttccttggatcatacagttttaatttcaggcgtttcaatattttacgggactcaatcagacatccgagtaacaaattattgccgtttgaatttactgggagcttncattttntaattcgagcgtctcagtatatgacgggattcaatc

SEQ ID NO: 18404 - DNA, 357 bp, Glycine max
  unsure at all n locations
agcttatgaccattcgaattttcgagagcttccgttgttcaatttcgagcgtctcgatatattatgtccccgaatcggacatttgtgtgaaaacttatgaccattcgaatttctcgagagctatcgttgttcaatttcgagtgtctggatgagttatgtccccgaatcggacattcgtgtggaaagatatgaccattcaaatttgtccagagggtccgttgatcaatttcgtgcgtctcnatatattatgtccccaaatcgaacatccatgtgaaatgttatgatcattcgaatttttcgagagcttccgttgtgcaattccgagcgtttagatgagctatgtccccgaatcgacat

SEQ ID NO: 18405 - DNA, 324 bp, Glycine max
  unsure at all n locations
agcttggtttccaacgctctgttcaagctctcccaaaatctagaggtaaatctaggatctctatcagatactatgctagattgcacaccatgtaacctgacaacctcacttatatacaaagtggtcaacttttccatggaaaatctgatattaatgggaatgaagtgagcaaacttagtcaatctatcaacaataacccatataaaatctaaacctctcagggttctaggtagtcctaccacaaaatccatggaaatgctgtcccacttncactatggtatctctaacgcttgtaacttacctgaaagtctctgatgttctatc

SEQ ID NO: 18406 - DNA, 186 bp, Glycine max
gaaagagtgatacgatcatgatgccacacaacatactagccttgaacctcatgcgcctatcctgaggtggctaaagagcgaacaagctcacactgatcgcccttcgctcactgtgcgctttctgaatggcaaacggtgcctgacgcctgctttaatgaatacgcctatgcgaagctcttgcagccg

SEQ ID NO: 18407 - DNA, 436 bp, Glycine max
tcgatggagaacaaccttaggatgcagagggaacactttcagagatgtataaattgtgcaagcaaaataggtcacgtctaatataatttaaattgtaagttcaacatcggttttcaataaaaataaacaaaaaccaatgttaacaacttgatgttaacgttaacatctattttattaaacaaaccgatggtaacgaactaaggttaacatcggttttatgaaaacccgatgttaactaattaatgttaacatcggttattccaaaaccgatgttaaagtcacttcattaacatcggatttcttctaacatgatgttaacgtatacacattattcacaattatgccaccgcgttatcttaacatcggattctaaaaaaccgatgtttataaagtctcattatttatcatcttgccaccgtgattctgcaacatagat

SEQ ID NO: 18408 - DNA, 445 bp, Glycine max
actcaagcttatgctgcaaacatttataatagaccacctcagcagtaaaacctttctcaactaaataattatgacctttcaagcaatagatacaatccaggctggaggaatcatccaaatctgagatggacaagtcctccataacaacaacagcctgcccctccttttcagaatgttaatggtccaagcaagccatatgttcctcctgcaatgcagcaacaacagcaacagtcacaacaaagacaaccagcaactgaggctcctcctcaaccttccttagaagagttagtgaggcaaatgatcatccagaatatgcaatttcagcaagagacaagagcctccattcatagtttgacaaatcagatggggcagatggctactcagatgaatcaagctcagtcccaaaattctgacaaattgacttcacaaactgtgcagaatccta

SEQ ID NO: 18409 - DNA, 320 bp, Glycine max
  unsure at all n locations
gcgatgtgttttatcttatgnggctcgcatatagcatatcctcagcatataacaccacgaatgagcacttactcccactcaacttgtggtatacaccatcatcacctgcttttgcctcacaatcatatgacggaacgacctgacgaaacctgtaataccattgatgggaatctcgtctctgacaatacatgaatccatctaggctgcacaccctacactttgagtcacctgtaacacagctctatggatgcatcacatcaattgtgtgtacaatgtcaccatttataaacgtacacctaactacaatctagcagttccta

SEQ ID NO: 18410 - DNA, 410 bp, Glycine max
agtatgatagatacgctggatcagacctaagctcttcctcagaagcaatcccattcacatccttcgttcctcgaaactctgaaaaggcagcaggagcaccaccaccaccaccaccagcaaacaaccctcctacggcactcaaagaaccgtccacagttggaggcgccgatccactcctaaaaatattaagctctcgctcacgatcatcagcctcttgtctgcgttgctcacgaagtaacatccctatctccttctccaattcatcaccaaaagaaccctcgttactcccaagcataggtcttcttcccaattcagacaacatttttcaaaatctcaatttgatcaccacccacaaatcatcaacctcatatagcagaaactgatcactacccaccaccagaaatcaaacc

SEQ ID NO: 18411 - DNA, 433 bp, Glycine max
  unsure at all n locations
tgcatacgttttcccaatttagtttgngaatcatctttctctacctagntaattctctcttttcataatcctcatatcccctgagttgttacagggattagagcacatatcctcaatgatctcgatggcatcaatagggggttttaacatgaggttacccttacaagcaacatctaaacttgtcctattgtgtgaggacactctaccatagaatatatggatcagtatctattgagtaatgtcatggtgtggacaacttctggtaatttctctacgagccaaaaaccttgtttgcgacattccccctgttatagaaggtataaaaataataaataatggaattctttgtaagagctacaaaactgacaactctattagaaagtagaatcttgcaacctttctcaagcgctctcttgttctctatgtacaaagt

SEQ ID NO: 18412 - DNA, 376 bp, Glycine max
  unsure at all n locations
tgttttatatatttatattatgnaactttttgcaattttaaatcaattattaattctagttatatgacttatacttaatgatgcattgtatcattaattattttttatttgataaatgatatatacttaatgattaacactgaatattattaatcattcttcaagaatatacatacacattcataatctctagctcttctgtgtatttgatctttaaagctcacaaaaaatctttctttaatgtaattgacatgacatggacttgatttcggcttatatatatataagttaatttggagacacgacgattgtcttctgtttaatcatcaaatttagttcttaccaccaacattttttaatgacttgagttgatata

SEQ ID NO: 18413 - DNA, 362 bp, Glycine max
tcgagtaaaataaaagattaaatggtcttaatctattacaattttttaaatgataaactaaaaaaagttgacacattaaaattaataagggaaaagttaatcctgatacttttcttgtattaacaaaaaaaaatttgacactaaaataaatgagattagtaactatgcacagtaaaaaattcaatcacaaatattttttaaaataattattctaaactattaacatccgtttagtagagtaaacataaatgaaaaataaataaattaagatgaaaatttagaattaaagtatacaataaaagtatgaatccccatatcatgtatattctcttaattttcatcttcttttattttcaaacgaa

SEQ ID NO: 18414 - DNA, 434 bp, Glycine max
tgtgcattcaatatcctgatgagggtgttccatatgttctcaagattggactatatacatttgctgcccaagtttcatggtcttgcaggtgaagatcctcataagcatcttaacgagttccatattgtttgttccaccatgaagccccctaatgtccaagaagatcatatctttctaaatgcttttcctcattctctggagggagtggcaaaagattggctatactaccttgctcccaggtccattttcagctaggatgaccttaagagggtgttcttggagaaattcttccctgcctctaggaccactgccattagaaaagacatttcaggcatcaggcaacttagtggagagagcttgtatgagtactgggaaagattcaagatattgtgtgcaagatgtcctcaccaccagatttctgagcaactccttct

SEQ ID NO: 18415 - DNA, 405 bp, Glycine max
  unsure at all n locations
agctnggtgnattagnngnaacgancttcaagagtgcatccagtctcaagggtcacgacgaagctcgattagtagtcatactaaagagcagattgaggatattttaaattcaaagcagagattaaagggggaaaagaatatgcccaaggaagatctacatattaagcaggctgcagcgctggttgtcaaacttgaaggaaattctctgttctcatctggaagtattgctggagctgcatcaaaatactctgaagctttggcattgtgtcctatgagatcaaggaaggagagagttgttctatacagtaatcgtgctcaatgccaccttttgctgcaacaacctttggctgccataagtgatgctacccgtgcactatgtctccataaacctgtcaatcgtcatgc

SEQ ID NO: 18416 - DNA, 400 bp, Glycine max
  unsure at all n locations
taagtttaagatttcttacatctttcccgaaatctggatacaaacgattaatcttcttccactggaaggaatcagccagatggtggagtattccatcccaatttatcccatgtgcatgccatgtaagttatgttgcataatctgcattagcaaacaaacgcctaaaccttggaatgatcagaagatactattacacctttgctagggggcctttctttgtgctttcatcactgctgaactcatcatcatccttcactttgtaccatgataccccacacctgnggcatttatggagttcttcaaactcatgtctgtgcaatatgcaatcattatagtattcatgtatnttttatactccatacccattagacacaatatcttcttcgcctgataataactt

SEQ ID NO: 18417 - DNA, 379 bp, Glycine max
atatcattatgaatcacgtcccaatatgttgaagaaaataggttgaaatctgtttgggctaggagccttgtgagatttcatgctcatgagagcatgcttgatttcctcctttgtgactggggcagtgagggcttccttagcttcttggctaaacataagaacattacgaatatgaatgacaacctcaaaggagttgtggggaaggcaaaagagattctagaagtaggattaagcctctgccttcaagatgtttgcatccgagcaccaggtgccatcatcgagctttagattgtgaataatgttacgatgcctacgcacaatagtttgagtgtgaaaaaacttagtgttgcggtagcccgatctgatccagtcctcacac

SEQ ID NO: 18418 - DNA, 332 bp, Glycine max
atcttcttatgatgcaaatgagtttgtagctacctcatgcactcctctaatgactatagcatcatttctggcgctaaactgctgggagttggaagccatctcctcaattaaatttctggcttcagcaggagtcatgtctccaagggctccaccactagcagcatctatcatactcctctccatattactgagtccttcataaaaatattggagaagaagttgctccgaaatcggatggtgagggcaactggcacatagttttttaaatctctcccagtattcatataggctccctccactgagttgtataatacctgagatatccttcctga

SEQ ID NO: 18419 - DNA, 399 bp, Glycine max
tcagtcttacacctctcattcttattactttttcaatattgaaaaagtcataacaatgaaaaatgaaaaggtcgtcttattcaaaaccccaaccaattatgaaatcccctatctcccacttcacacctcggaacgcaccgttcttatagagagaggcgctttcacatcttcttaggctggggagaggaaatgttcccattttttaggatactccggggaacagatatccagtggagatgacggggtggggcctgtagctcagaggattagagcacgtggctacgaaccacggtgtcgggggttcgaatccctcctcgcccacaaccggccaaaaaagggaaggatctttccctctgtgggtaggacaatcatgatcgggctagcggacccaaagctatg

SEQ ID NO: 18420 - DNA, 407 bp, Glycine max
  unsure at all n locations
agcttgctcactgttgcatgctccanatatcttgtgcatattggcgaacttctgaggctcttttggagggaaatatggggagaaaatgcaatccatcatgcattttcttaagaacttgcaggcatcacaaggagagttagagtagctagatgaggccatgatctttactgcaattataccaactatgaatcaagcacgtacaataaaacaatttactctcaaatgttggaataagtgcttacgatagattataggaacaattgactaatgctcacagaaacatattgatcttctttaatatttatataagcaataaggaaataattcattatagagagtacaaattgaatggtactctaattcatgagtacaacgtttaagataacattaaaatcaaaatacattac

SEQ ID NO: 18421 - DNA, 416 bp, Glycine max
cggaaaagctctgtcagcttcttcattccttgaaattgatccttgtctagtaaggcgggtagaggagcagctaaggacgcgtaccccttaatgaaacgacgacagaaccccgataatcccaagaaccctcgtagggcacacgtattccgaggagtaggccattgttgcaccgcggttaccttcgccggaactggttccaccctttttttcgataccaagtggcccagatattccacttgctgagttgcgaaagagcacattgataacttcatgacaaagctatggtcagctaagacttgcaatatctttcgcaggtgctcaaggtggtcggagaaggtctgactataaatcaaaatatcgtcgaagaagacgattacgaatttatgcatatacggtcccaaggtctgattcatagt

SEQ ID NO: 18422 - DNA, 406 bp, Glycine max
atttcgttttaatgtggctctggaccaatatacaaggtgataaagaatactggtatcctgaacttcttctattttcctttaaaactttctaaatatagcagaagattatttttcacggaacattgatagatgggaaagtgatagctgtgaaaaggctttcaaagaagtccaaacaagggctggatgagttaaaaaatgaggtggcactgattgccaaacttcagcaccgtaatcttgtaaagcttcttggctgctgcattgaacgagaagaaaatatgttaatttatgaatacatgcccaacctcagctgggactggctttcttttggttggaccccttacgattttattctaaacatcttagataatcagcatattgcgtatttgtagcttatacacttacagcg

SEQ ID NO: 18423 - DNA, 405 bp, Glycine max
agtctttgtattctggaatcatttatcctatcttcgacagccaatgggtgagtcccgtccaggtagtcactaagaaaaccggcctcactgtcataaaaaattagaaggaagagctgattcctactcgggtgcagaacatttagagagtctgaattgactataggaggctgaaccaggttaccaaaaaggaccattttccactgccattcattgaccggatgcttgaatgcttggcaggattatataggcgctttataagagattttagcagagtagcccttccactatctaacttgttgcaaaaggagatggagtttgactttaatgataaatgcaaagaggaactgactaccacccctatcattcaggcacctgattggacagccccatttgagctaatgtgcg

SEQ ID NO: 18424 - DNA, 392 bp, Glycine max
tcactagcttttgctagttctatcatctcaaaatacatagtggactgagctaagatagtctgtttctttgacttccaagaaacagccccaccaggtatgctaaatatatagctgctggttgctttggaatcatctgaaagagtgttccaatctgcatcgatgtatccttcaagtacagcgggaaaccttttataatgtaatccaagatttatggttcttataaggtacctcattaccctttcaatagcgtgtcagtgctccatactaggtctactggtaaacctgcataataatcccacaacataagctatgtcgggtctagtacaatcagtggcatacctaaggctgccaatgatacttgcttactcagtttgccgtataccttcaccagt

SEQ ID NO: 18425 - DNA, 391 bp, Glycine max
gttatgcaagaagcgtcttctaggcattctccaaatatcaaataatattagatagtacctgagccaaatagccccccaatgctgggccaatgatcaaacctatgccccaagctgcgctgacctaaaatcaaatctcactttcgattattattatggaaatgtagttctaaaatctactactataacagaggtggtgatgcttacagttgagagtcctataccttggtgttcttgtcgaaaaagttcataggcataggcctgttaaatagaggagttaggcacacagaagcttaaatggaagcgtgaaagcgatcgaacagttatatattcaattgtgcacacacattcaagacttgtattctgaaacatgagagtgctaactttgatacct

SEQ ID NO: 18426 - DNA, 398 bp, Glycine max
  unsure at all n locations
agtttccatgtttaattacgagcgtgtcgatatactacgggacacaatcagacatccgagtccaaagctattgtcgtttgacttttcttagagctatcgttttcgatttcgagcgtctcgatatattatagggctcaatcggacatccgagttaaaagatattgccgcttgactattcttagagattccgttatcaatttcgagagtctcgatatattacagggctcaatcgaacatccgagttaaaagttattgtcgttagatttttctcagagcttccgttttcaattacgagcgtctcgatatcctacgcgacacaatcggacatccgagtganaagttattgtcgtgtgactcttcttatagctgccgctttcaatctcgagcgtctcgatatt

SEQ ID NO: 18427 - DNA, 376 bp, Glycine max
  unsure at all n locations
tgcttgagcaaattcaaacgactataacttttgattcttatgtccgattgtgtcccgtattatatcgagatgctcgtaattgaaaatagaagctctgagccaattcaaacgacaataacttttgactcagatgtccgattgtgtcccgtagtatatcgagacgctcgaaattgaaaactgaagctctgagaaaaatctaacgacaataactttttactcggatgtccgactatgtcccgaaatacatggagacgctcgtaattgagaactgaagctgtgagcgaattccaacgacaataactttagactcggatgtccgatngagtcccgaaatatatctagacgctcgtaattgaaaacagaagctctgagaaaa

SEQ ID NO: 18428 - DNA, 436 bp, Glycine max
  unsure at all n locations
nttatgtgggatacccaatgtaagcatagtttccagttcattattgtaaaattgacaaccgctctagtgttagttttgcctaacccgagagaaccctttgaggtgtattgtgatgcatcaaagatgggtttaggaggagtgttaatgcaaagtgaccaagtagtggcctatgcttctagacaactcaagactcatgagaagaattatcccacccatgatctggagttggctgttgtgatttttgcccttaatatgtggaggcattacctgtttggctccaagttttatgtgtttagtgatcataagagcatgaagtacttgtttagttagaaagagccgaacatgcgtcaaaggaaatggttagagtttcgtaaggattatgactttgagcttagctaccatcccggcaaagccaatgtattggttgatgccttaa

SEQ ID NO: 18429 - DNA, 421 bp, Glycine max
  unsure at all n locations
atcttgagataagggtctatcattgaacctttgactatttatccatcttccttggggcttgactcaatggttcctttgaatcctttgtaccatggatccattggcaccattgtctccccactcaataaacgcctaacattggcaatgatttcccttggattataattgggaatgtaagaactgcagtctatcccaattcgttgactaccattgacaagaaccaatggtattactggtatgtacctgtaaggccagacaacaaaaattatgtttaagggacacatgcaaatgcagtagaaaagacaaacagactctatcaactgaaaaactgtgtntgaataccatacacaaacaagggctaaattgtagatgtttcactctcaaccgcaccatcaaagatactgacaaaaacatgttgatg

SEQ ID NO: 18430 - DNA, 396 bp, Glycine max
atcttgaaggtaaactagatgccttggttaacctggtaacccaactggccatgaataaaaaatatgcacctgtcgccagactctgtggtttatgctcctctgccgaccaccacacggacctttgcccttctgtgcaacaatctgaagcaattgaacagcctgaagcttatgctgcaaacatctacaacaaacatcctcaacctcaacagcaaaatccgccacaacaaaatagttatgacctctccagcaacaggtacaatcccggatggaggaatcatcccaaccttagatggtcaaatccttcacaacagcagcagcaacaacaacaaccttattttaaaatgttgctggcccaagcagaccatacattccaccaccaatccagcaacaacaaca

SEQ ID NO: 18431 - DNA, 416 bp, Glycine max
tcttagtctcagatgatgcaggtgagtttgtagctactctcatgctctcctctaaagactatagcataatttctggcgctaaactgctgagagctggaagccatcttgtcaatcgaatttccggcatcagcaggagtcatgtttccaagggctccaccactggcatcatatatcatacttctgtccatattactgagtgcttcataaaaatattagagaacaagctgctccgaaatcagatggtgagggcaactggcacatagttgtttaaatctctcccagtactcatacaagctctctccactgatgtgactaatacctgagatatcctttctgatggctgcgcgcctagaagcagggacatctttttctaagaatactctcttaaggtcatcccagctcgtgatggaccatgg

SEQ ID NO: 18432 - DNA, 398 bp, Glycine max
agctttgttggtgcgtagctcaccatcttttcatagtagaataccggtaatgtgtctactatcattatcatcatttttttttctccgtcattgaggtgccacttgagctgccaggtctctccacctttgggcgtattcttttgaaagattcgtgccacctttttgcacatgttctgtagttgcatcctatccgaagacattatactgacactgcctaacgaaggcaatcactaggtccttccaagaattgactcgggaaggttccaagttagtgtgccaagtaacagctaccccagtaagactttcttggaaggaatgtatcagcaattcctcatcttttgcgtatgcctccatcttccgataatacatctttagatggttcttggggcaagtagtcc

SEQ ID NO: 18433 - DNA, 404 bp, Glycine max
tttagcttggatttccttttagtagggaatctatccttcctaagatggagccaaacccagtcaccctcattaagaactagctcttttcttcctctattgcctttagttgaatacacctttgtttggttctctatttggttcttaaccctctcatgcatcttctttacaaattctgacctagattccccttctttatgtataaaagaagtgtccagtgggaggggaatgaggtctaacggtgttaggggattaaacccatagacaacctcaaaaggggactgcttggtggttctatgaaccccactgttgtaggcaaattctacatgaggaagatactcatcccaagacttatggctgcctttcagaagagcccttataagggtggataaagacctattcactac

SEQ ID NO: 18434 - DNA, 369 bp, Glycine max
ttagcttgtggtgcaaaagattacatctatacaaaggaattttttatggggcagcctccaagactccaccaagattccctgggtgaggtgggacatagtctgcctactaagagtaaaggtgggttagggatcaaagatttgattaaattcaatgaggctttgcttgctaaatgggggtgggagttggaaaataatcagaatcagttgtgggccagaattctattgtctagatatggtggttggagggatttgatttctgatatgaactgcagtttagactctccttggtggaaagacctcaaggatatcttcaagcagcagcatagcaacacaatttgcaatcacctgaagtggaagctgggatcggga

SEQ ID NO: 18435 - DNA, 403 bp, Glycine max
tgcatttattgtttgcccttaagatgtggaggcattacctatttggctccaagtttgaggtgtttagtgatcataatagccttagtacttgtttggtcagaaagagttgaacatgcatcaaaggagatggttagagtttcttgaggattatgattttgagctaagctaccatcccaacaaagccaatgtagtggctaaccccttaagtaggaaatccctacatatatatgccttgatggttagagaattggatctcctaaaacaatttacagactttatccttgtgtgtgaggttacccctaacaatgcgagactaggagctttgaggattactagtgagttgttaggagagatcagatatggccaaaaggctgatccttttctgaagactaagatagaagct

SEQ ID NO: 18436 - DNA, 389 bp, Glycine max
  unsure at all n locations
agttttccacattgaattcagcacctaatgtcatattagatgggaattgggtatcttaacataagagatttcagatggactttaatcctaatcccacagccgaccttttcacgagatctctacttaaccctttggttaaatgatcggccaaattatgctgagttctcacagccctacatccccaaattttgagataactcaaatttggtgtctttttgtgccaaagttcatatggcgtaaccttattccttttgttaggaattcggttcaacaagtaacaggctgccaacatagcctcaccccanaatccttcacttgaacctgaataggataacatgaaattcaccatttctttcaaggttctattcttcctttcggctacaccattc

SEQ ID NO: 18437 - DNA, 423 bp, Glycine max
  unsure at all n locations
tcacaaaagtgtgtatggcttgaaacattcaccgatgcagtggttcaagaagtttaatgagtttatgagcaactcaggattcaaaagatgtgacatggaccattgctgctatgttaaaaaatatactaatagttatgttatccttgttgtgtatgttgatgacatgttgattgcaggatctagtatggcagaaattaacaggttgaagcagcagttggcagaaaactttgaaatgaaggatcttggtccagctaaacaaatccttggtatgagaattctcagaaacatatcagaaggaattttgaagctgtctcaggagaaatatatacacaagttgcttgacaggttttaccttggagattctaagaccaggaatacccctttgggatctcatttgaagttntcaaagaagcaatctttgca

SEQ ID NO: 18438 - DNA, 394 bp, Glycine max
  unsure at all n locations
tgtcttaagaaaacccattccccaacctcaaaatgcctgtcagccctctttctgtcagcttggttcttcatcctattctgcgctcatcgcaactgatacttcaactgtgaaattgcttcatctctgtcttgtaattccctcctaaccgcttccacgtgaacctcccctggtaaaaacctacggagcatcggtggtttgcgaacatagacaacttcaaacggggtcattccagatgacacatgaaaattggtattatactaatattcagcccaagatagccaaaggacccaaattttgggttggtcagctagaaaacatctaananatgtttctaatcaccacttatgtttgcccatccatttgaggatgatatgctgtgttcatcttcagagct

SEQ ID NO: 18439 - DNA, 395 bp, Glycine max
  unsure at all n locations
agcttaaccaatatgtaaagcgataattaaaagtacacatcagaaattaaagagtgtagggaagaagaagacaaaaacaatatttatactggttcggccacaaaccgtgcctacatctagtccccaagcaacttgcggttcttgagatttctttcaaccttgtaaaatcctttacaagccaaagatccacaagggatgtactctcccttgttctctttgaataaccaagtggatgtaccctccacttgaactgatccacaagagatgtaccctctcttgttctcagtataacaatccccaagtagatgtaccctctacttgtaccacanaggatgtaccctccaatgtgttgggacaaagaattctcaggcggttagtcctttgaatctttgtaa

SEQ ID NO: 18440 - DNA, 402 bp, Glycine max
agcttatatacatctgcaacgtgaattctgttacaactgaaaagataactaactaattcagccaactaactaactatttctgttaaagctgtttatactgctaagagcccccctcaagctgggaatggatattcatcattcccagcttgttacaaaggggctgaaaggtggctggtggtaaagctttggtgaatatgtccgcgagttgcatggaagatgagaccggaaggagctttacgagacccgcaatgactttgtggcggataatatggcaatcgatctcgatatgcttagtgcgttcatggaaaacgggatttgttgctatctgaattgcagattggttgtcacaatataaggtggctggctgaataaatgctacaccaatgtcttggagaatatacg

SEQ ID NO: 18441 - DNA, 396 bp, Glycine max
agcttgtatcctccattgaagctcatcctagcaaagcagttcaagttgtattgaagtcctttttggctaaaatttacatgaggcagaagtagagtcaacttatggcgaggaccaaaattgttgaccatgcaatagaaactagagttctgatttctatctagtatctagagcagtatcatgttctgtggcttgcaattttttaaaaattgatgttcttatttgacaatcctttatttgatgcagaaaatccattatttgataatgatctttcctcattttttttctcatttctactactattctttatatccataataatcaggtgctttttcatcaggtttattaataacttgaaccctttccttctttgttttcatttataatgcatctaatcta

SEQ ID NO: 18442 - DNA, 412 bp, Glycine max
  unsure at all n locations
tctttgagaaaacttccttgagaagctagagcttatctacacacttcccctctcataactaagctcacctccttgaaaagcttccttaagaagattcctaaagaagctagaacttagctacacatacctctctaatggctaagctcacctccttgagatgagaagctagagcttagctacacaccccctataatagctaagctcacccccatgacaaaatacatgaaaatacaaaacaaaatccctactgcacagactactcaaaatgcctcaaaatacaaggctaaaaccctatactactagaatggccaaaatacaaggcccaaacgaaggagaaacctattctaatatttacaaagataagcggcttcatacttagcccatgggctcanaatctaccctaaggctcatg

SEQ ID NO: 18443 - DNA, 338 bp, Glycine max
tgtttcaacctagaggagacggaccattccaagtgttggagaagatcaacgacaatgcctacaagattgacttgcctagtgagtataatgtaagtgccactttcaatgtgtctgatctatctctttttgatgcagatggaggagccttggatttgaggacaaatccttttcaagaaggagggagtgatgaggacataaccaagggcaaggaccatgaagcacttgaaggtcccatgaccagaggcagacttaaacaagcccaacacgtcatagagacaaggctggtcatttgtatagctgccattgatgatgattgaaggcccaagtggagaaagatg

SEQ ID NO: 18444 - DNA, 406 bp, Glycine max
  unsure at all n locations
agcttgtatggtagcntaaggctatattcagaaggaaaaagtagactataatgaaatattctttttagtagtttgacacacctccacacgtgtttggctagccctagtggcaactcttgacatggagttaaagcaattcagtgccaaaactgtctttctccatggaagacaagaggaatacattatgatgttatgatttgaaggttttgaggtggaagcaaaggaaaattttgtctttagattgaagaggtctctntatgggatgaagcaatcaccaaagcaatggtgcaagagatttgatgagttcattatctcgcatgggtacattagaagtctttatgactcatgtgtttatcatagcaaggtggaggatggttcccacatatatctattactctctatggat

SEQ ID NO: 18445 - DNA, 423 bp, Glycine max
tatgctgcaaatatttacaatagacctcctcaaccttatcagcataatcaaccacagtagaacaattatgacctttccagcaacagatacaaccctggatggaggaatcaccctaacctcagatggtccagccctcagcaacaacagcagcctgctccttccttccaaaatgctgctggcccaagcagaccatacattcctccaccaatccaacaacagcaacaaccccagaaacagccaacagttgaggcccctccacaaccttccctcgaagaacttgtgaggcaaatgactatgcagaacatgcagtttcagcaagagaccagagcctccattcagagcttaaccaatcagatgggacaattagctactcaattgaatcaacaacagtcccagaattctgacaagctgccttctcaagct

SEQ ID NO: 18446 - DNA, 399 bp, Glycine max
  unsure at all n locations
cagcttgtgttgcaataagtggtggtattcatacaaagatgggtttgagcttaaatgtcattactagggggaattctacttttatgatgcttgagaagtgcccttgtatatcgatgtgctttttgtagtctggaatttgatgataggagctattcaagttgtcttattaatgaagaatgggagagaggacaaaatatgtgtgattttttgcgtccttttttttaaatcacagagttgatatctggttcctcttatccaacgtctaatttgtaattcatgcaagtgtggaaaattgaatgtntattgcttcaaaatttgagtaataaggatgagttgattagaacaatggaaattgatatgaaaacaaagtttgataaatattggagtgattatagcaat

SEQ ID NO: 18447 - DNA, 408 bp, Glycine max
  unsure at all n locations
agctttcaccccacccaccattaactcaccacatggcacacctcaacatcctgccttaccttctcccgaacctgtccatgtttcatcttcttctcaatcacttgcaatggaatcactctctcggtcttctacgccaactatatctcaacattccatggtcactcgtggaaaagctggaatattcaaaccatagaaattattctctgtgagcaagcatccaatttttccagttgaagaaccaactagtgtatccaaagcactacaatgtcatcaatggaagcaagccatgtcagaagaatttaccgatctcatgaataatggtacatggtctctagtccncagtcaaccacattntaatgtcattggaaacaaatgggtgtttcgttttaaaagaaatccaaatggatc

SEQ ID NO: 18448 - DNA, 419 bp, Glycine max
tgcctaattaacctgaaatttataggaaatgattattaaacacacaaaatagaattactaagtatttgttacctatctttaactaaaagaacttatagcactacaaaataaccattaaatgaaggagtttaatacaatttacataagttttatacacaaaagttagttgtattcatcgactaacacacacacacacaatgtaagtgaaaatcactattacaccattaagtagcttcttactggatcattttatcccaaaatccaccattggatagaaatgtcttgtcatagacatcatgtgtataaagtgttccattaatccaaacttttgtggtactttattaatatacaattaaatattaagattaacatagtatattagaatcattttattacttttattgttcaatttatatgag

SEQ ID NO: 18449 - DNA, 378 bp, Glycine max
tacaatggttgtatactagcacaaaaatgtgccattttaatcataatgctcattgattttcattttgatttctttgtgtgtgtttatatcctccattacaatgaattgttctactaaagtttttttttttttttttcatttgcaagcaagaatacatatgccttttataatttgctcgattatattttttgtgaccaaaacataggctaccatgcaagggttgcaaggtccccaaccttggagattgctactcttattgaagggacaatgtattttatacagaagacatggagatgtattggagccattcaaatatgccggctatcccatgttgctgagtgctgttactgtggacaaggatgacaacaattttctttc

SEQ ID NO: 18450 - DNA, 388 bp, Glycine max
  unsure at all n locations
tatctcagaggacactgacctgaccttttttagngttctatgngatattctaattgctcttgtaaattgatatcttcatacctgcaaattaatatccacttataatagagcaatgatggatatataatgaagtactcatacatgtaggtaactgtaatttgaaattatttaaacgttctttatcatatataaagtaattctaatttattttttgtataaatatatatttcaattgttatgttatggtttacttcttaaaaaaaaatattttaataaatatctacgtacattcgtgaatatacatgaatagntgtactaatactagggaatgaccaaggattactatttactacccatttatatacaccgtcacatcttagtaaaaata

SEQ ID NO: 18451 - DNA, 381 bp, Glycine max
  unsure at all n locations
agcttattttttcttgttggaaggaccaagttaaaaaccttttgaacatttnttccagcttgctgatctatctcctctggtttccttcccttctcttttggtttaatctcagccacccctgactcttcactntcagataaggtagctgaagttaaagaatcaccttttaatttaatttgctgaggagaattgccagccaaacgtctgacaaatcccaacccaagatcattatcagtcacatcagatacagaatctaaagcaggggagtcatcattacttgatacaatgggcacaaaattggttcttctggcagtacgggagctctttngtggcctctgccagtggacaacaggtggggaagatgatcgtgcggatgccaca

SEQ ID NO: 18452 - DNA, 418 bp, Glycine max
agcttcctattttattaagttcttcctcaaaactgtcctaagcaaagttcccaaagtcctattaacaacttccgtttgcccatcggtttgtgggtgacaagtggttgaaaataacaatttagtgcccaacttgctccacaaagtcctccaaaaatggcttatgaacttagagtccctatcactaacaatgctccttggcaaaccatggagtctcacaatctccttgaaaaacaaatcagccacatgggaagcatcatcaatttttttacatggaataaaatgagccatcttagataacctatcaacaaccacaaaaatggaatctctaccattgcttgttgttggcagccccaaaacaaaatccatggataaatcattccaaggatactccggaattgcaatggatatacaatcatga

SEQ ID NO: 18453 - DNA, 400 bp, Glycine max
agcttgaattggacctcagtgtgaaaagttatgaccatttgaatttctcgggagcttccgttgttcattttcgagcgtctgtatatgtgatgcgcctgaatcggacatccgagtgaaaagttatgaccatttgaatttctcgagagctttcgatgtttaattttgagcgtctcgatataatataagcctgaatcggacatcagtgtgaaaacttatgaccattttaacttctggagagcttccgttgttcattttttagcgtctctatatgtgatgcgcatgagttggacatccgagttaaaagttatgaccatttgaatttctcaagagctatgcgtgttcaatttcgagcgcctcgatatattataagcttgaatcggacctgagtgtgaaaagtatg

SEQ ID NO: 18454 - DNA, 422 bp, Glycine max
  unsure at all n locations
agcttgacatgttctgtttcaagtgttgctactggtgtagggacttcaatttgcttgccagacctcaaggtgatggcactcacatttttcagattctgcaccgtttgtgaaggcaatttgtcagaatattgggactgagcttggttcaactgagtagccttctgccgtatctgatttgtcggactctgaatggaggctcttgtctcttgctgaaatttcatattctggatggtcatttgcctcactaactcctctatggaaggttgagaaggggcctcagatgcttgttgtctttgttgttgctactgcattggaggaggaacatatggccttcttggaccaacaacattctggaagggagggataggctcgtgntctactgatgttgttgtggaggattttcccatctcacatttggatga

SEQ ID NO: 18455 - DNA, 427 bp, Glycine max
  unsure at all n locations
agctntctcttttgtgcaactatctcatcctctttttcaggtgtagaatgaagcttgacaggttcaggtgcaggtgctgctactgatggaggcacttcaaattgtttgtcggacctcaagatgatggcactcacatttttcggattctgcacagtttgtgaaggcaatttgtcagaattttgggactgagcttggttcaactgagtatccatctgccccatctgattntttagactctgaataaagactctggtctcttgctgaaattgcatattttggatggtcatttgcctcactacacttctaaggaaagttgaggaggggccttagttgcttggtgtctttgttggtgttgctattggtgctgcattggaggaggaacatatggcttgctntgaccagcaacattctgganaggagggacatg

SEQ ID NO: 18456 - DNA, 457 bp, Glycine max
  unsure at all n locations
actcgtccgggatcttaagtcaccgctgctgcagctatccatgctttttggccgtcgttgcattggatattttctcaaatgtatcttcatccaccgattgataaatgagaaagagagctttcttgtctctctttcttgactccttcaacgtctcatttacaccttggcttagcgaggcttcatcttgctcctcgaagccattctctacgatatcccacacatcttgagctcctagtagcgccttcatcttgatactccaattatcatagttgttctttgagagcatcgacatttggaaaggaaaacctccattcgccatcttttgaggatcttgaagctctgataccactttgctggatataaggctctttatgtttacgacaaatgtttacgaatattggagactntgaatagacatttgataggaacgagaattctttatggagaagagaacttt

SEQ ID NO: 18457 - DNA, 388 bp, Glycine max
  unsure at all n locations
agcgtgtttatttttatatgtagaggcattacctattagggtactagtttgaggagcctagtgatcatgagagcctgaatactttgttggtcagaaagaagttaacatgcctcacacgagatggtttgagtgtactgaggattatgatcgtgaactaagctaccatcccttcaatgccattgtagcggctaaccccttaagtaagagatccctacatatatatgccttgatggttagagaattggatctcctatagcagtttagagactntatccatgtgtgtgatgtacccctaacaatgcgagactaagagctctgaagattactactgagtagttaggagatatcagatacggccaataagctgatccttttctgaagactaaca

SEQ ID NO: 18458 - DNA, 419 bp, Glycine max
  unsure at all n locations
agctttgcttctactttttatacccactaaacgtcaaacaagattcccttcatgacaaaaaaatgttctctctaatctctagtcatcacaaatgtagagagacccacataatagttaagggagtgaaatcttatttctctcatcttccaaaacattaaagtacatctgagagaagcttcactatgactcattatttatatatttattatttatgacaatcataggtttcaagatccggttgattttctatcattgatcatctaagaaactcttanaatttttacatgtgatatcggaacatagattatcaacattatgattctctaataatgatttattctttctcaattatgaatgaatcctaattatcaaatgtaaaaatcttattttcttctgcggctatgtatgatatgttatta

SEQ ID NO: 18459 - DNA, 414 bp, Glycine max
  unsure at all n locations
agcttgttgttaattcaaacaggaataactttgtactcggatgtctcattatgtcccgtaatatatcgagatgcttgaaattgaaaacggaagctcgtagcatatgcaaaacacaataactttttactcggatgtccgattgtgtctcgtagtatatcgagacgctcgttattaaaaacataacctcgtagcagattcaaacgaaaataactatttactcgaatgtttgattgtgtcccatagtatatcgagacgctcgtaattgaaaacagaagctcttagaagattttaacgacaataactgtttactcggatgtccgattgtgacccgtaatatatcgagacgctggaaattgaggacataagctcttaagaaattctatagacaacgactntatactcggatgtacgatt

SEQ ID NO: 18460 - DNA, 432 bp, Glycine max
agcttaccaatatatattcaaatgaagtttatgtttctttgtgttctatatgtgtgccctaagcatttaaatttattgacctggaggatatgatcacttcatcatgtgttgattagcatatcaatagtttgcatatggtcactgacaatgctttattccaataactaaaatgaagaataacttcatatgacttgtcctgccagtattgttgatgttgagatcaagcctgtggaaggtgaactttctaaatcactgttggaaaacaacaaatgctatttactggactgtggtgctgaggtgtttgtctgggttggtcgtgtgacacaagttgaagaacgaaaatcagcctgccaagccgttgaggtaaggccattgtagaatctataatctaattcatttccatttgtttgttaaattggattcattaattct

SEQ ID NO: 18461 - DNA, 432 bp, Glycine max
  unsure at all n locations
agctntgacctcatttctattattctctattcttgggtcattgtatacaagttgggcaagcgtggtcttacccaacccgtccatgcccacgatagaaagtactgacagcttgttatcagtgttagaagtgagccagttaatgataatttctttatcaccctctctgccacaaatatcactttcaaccactgaagatgttgattgtggcactttaccaccagatcctgatccaactacaagatcactaggctttttcaaacctagattatccatccggcttgcaagtacaggtttgagattcagattgaggttgaacttggagtctggagtgttgtatttcatccaagacatcttctacgtcaagcatggcaactntgagcttaataagccagtctctcacttgcatatttccaaactgtttttgttcagcat

SEQ ID NO: 18462 - DNA, 428 bp, Glycine max
  unsure at all n locations
agcttattgtgtaaattgttcttatttcttaccacatagatacaaggcatgggtggagtatggattangagtgtcaaactaatgaattggataatttttttgaattgaaatggatagccaatccatttatgatccattaataatgtattgcaaaaatctaatttatccataacttatttcatagaaaaaggtccatccattatattttatttttttcaaaacaatatttttctaaaacaaagtgtaatatttgtacaaattcttacactgaaataccatagaatccaatatttatctcataaagacctatgtccaagtaatgaacttggaactacttgattcactggattgcaaaatatgttggatggttcattatctatccaataacaaatggtaatccaattcaactaatgtanttaagtttattt

SEQ ID NO: 18463 - DNA, 442 bp, Glycine max
  unsure at all n locations
tgtagggttaaagtctcatgattgtcacgtgctcatgttacaattgttagccgnggctatacgagacatcttgccaaacaaagtcaggttagcgataactcgcctgtgctttttattccatgctatatgtagcaaagtcattgatcctgtcaagtttgatgagttggaaaatgaggccgcaattatactgtgccagatggagatgtattttccccctgctttctttgacatcatgattcacttgattgtgcatctggtcagagaaatcaaatgttgtggtcctgtttatctactgtggatgtacccggctgagcgatacatgaagatcttaaaagggtatacaaagaatctatatcatccagaagcatctattgttgagaggtacattgcagaagaagccattgcaatttgttcataatacttatagaatgctaaacctgtt

SEQ ID NO: 18464 - DNA, 392 bp, Glycine max
  unsure at all n locations
gcttctcttggtaagaatgtgggctctatttcgtagttttgcatggncactagcagccatgttctttattaattccatagctccttctggggtcttcaatttgatctttctccctgcagaagcatcaagaagctgcttggactgcggtctcaacccatcaataaaaatgttgagttgtatcagatctgaaaatccatgagtaggtgtctttctcaataagcctctaaatctttccaatgcctcacttaaagattcatctggaaattcatggaaggatgaaatggcagctttcccttcagctgtcttagactctgggaagtacttcttcaagaatttctcaactacttcatcccaagtcttgaggctatcttctttaaacgaatgaaaccacc

SEQ ID NO: 18465 - DNA, 426 bp, Glycine max
  unsure at all n locations
tgtagggttaaagtctcacgattgtcacgtgtagtattttataattgncagncgaggctatacgagacatcttgccaaacaaagtcaggttagccataactcgcctgtgctttttcttccatgccatatgtagcaaagttgttgatcctgtcaagtttgatgaacttgaaaatgaggccgcaattatactgagccagttggagatgtattttccccctgctttctttgacatcatgattcacttgattgtgcatctggtcagagaaatcaaatgttgcggtcctgtttatttgcggtggacgtacctggttgagcaatacatgaagatcttaaaagggtatacaaagaatctatatcatccagaagcatctattggtgagaggtacattacagaagaangccattgaatttgtttggaatatattg

SEQ ID NO: 18466 - DNA, 351 bp, Glycine max
  unsure at all n locations
cttctgaagaacctccagatggacatcatacattctgcttacttcatncnagatatgcagctcaaagccacattaactgcgcaatgtcttggaactacaaacaccttaagggcattgctaaagacaggtaagtcgcattacttgtaccattgtaagttcaatattcactacttctcttttgtctattccatggttgaccaaaaaaatattgcaaaatttcaggttgattacatattaggtgcaaacccattaagaatgtcttacatggtaggctatggtccttactttcccaagagagttcaccacagaggatcttccttgccttcaatagaagctcatccacaaaccata

SEQ ID NO: 18467 - DNA, 393 bp, Glycine max
agcttgtggttttctcgcgtgtcattagtcaactctgatttttattgaataaaacattattttgggcattagatcaaagtatctgtcgttcttaaatatttttaaactaaacaaattatacaataagttttttattttgtacagaacaagaagtggctaaaaatattattatttttttactaaaagaagttgttaaagtaatagaaatcaagttattatcattcagatgttaaaaaaaaatcttcaaattaaactcttgggaacatttggttgagttgagctgaatttttttcttatttgaaaattatgatttcagaagaatttgattattgaaaattatgattcatgtataaatatatttgattagttctaacataattattggaaattaaa

SEQ ID NO: 18468 - DNA, 419 bp, Glycine max
  unsure at all n locations
acactgtgctccgcccaattcgncaagcaattcatcattggtctgaatggggaagcggtccttgatggtgagtgagttcaacgcacgataatctacatagaagcgccacgttccgtcgtgcttcttgaccaagaggaccggagaagagaacgggctgttactangttgtatcagccctttctgaagcatggtctcgacttgctgctcaatttcctgcttttgaaaatgtgggtatcgatacggacggacattcaccggagtagcttgaggtaaaaggtgaatatgatggtctgttgtgcgttccggtggtaaggtttgcggttgtcggataaggatattatatctggtgagcaaagcttgaatggatgggtccacgggttcagatgaagtcgaatgttctttcgagaggactgtgatat

SEQ ID NO: 18469 - DNA, 396 bp, Glycine max
  unsure at all n locations
tagccctagaggggatggaccttntcaggttttggttatgatcaataacaatgcctataggttggacctcctagaagagtatggagtcagcaccacttttaacatttctgatttaattccttttgcaggtggagctgatattgaggaggaggaactaacagatttgaggtcaaatccttttcaaggggaagggtatgatgcaatcctccctaggaagggaccagtcactagagccatgagcaagaggctccaagaggattgggctagagttgctgaagaaggccctanggttctcatgaacctcagggtagatttttgagtccatgggccaagtttgggtccaattctctttgtacatattagactangatgtcattatatntgatccttgtattt

SEQ ID NO: 18470 - DNA, 437 bp, Glycine max
  unsure at all n locations
tctanactttgtacaagaatgaagctctgataccacttgttagacaagtggcctcagatatcttaagaagggggggttgaattaagatattccaaactgtttcccctaattaaaaatctatttctctttttactcaagttatgaattcccttaaagacaatcttcttaaatattaattcaaacgaagcaacttgaatgtgaatataaagcaataataaataaaagagattaagggaagagaaaatgcaaactcagttttatactggttcggccacacccttgtgcctacgtccagtcctcaagcaacccgcttgagagttccactaacttgtaaattccttttacaagttctaaacacacaaggacaatccttcctttgtgtttagagatcctttacaacaagagactcacagtctcttaatccctttagagaatga

SEQ ID NO: 18471 - DNA, 417 bp, Glycine max
actgtcaatttcagcgtctcgaatagttcggttttattcagacatccgagtaaaaagttatcgtcgtttgaatttggtcggagcttcaacattcaatttacagcgtctcgatatatgacgggactcaatcagacatccgagtaaaaacttattctcgcttcaatttgctctgagagttcagaattgaatttcgagcgtctagatatattacgggactcaatcaaacgtctgagtaaaaagttattatcgtttgaattagctcggaacctcaaaattcaattttgagcgtctcgatatattacgggactcaatcacacatctgagtgaaaaagttattgtcgtttgaatttgctgaaagcttcaactttcaatttcaagcgtctcgatatattacaggactcactcagacatccgagt

SEQ ID NO: 18472 - DNA, 432 bp, Glycine max
  unsure at all n locations
tggaatgggaagaagccatcaacaaagcacctaagggtctttggatctatatgctacattcatattctagacgtgaagaggcacaagcttgaagacaagactatacgaggtatcttccttgggtatagcaatatctctaagggctaccgtgtctacaacttgcaaactaagaaactcatcatcggtcgagatgttgaagttgatgggtacgctntttggaattgggatgaagaaaaagtggagaagaacgttcttatacctgctcgactatctcaagaagaagctgaggaagaagatccaggtgaaccaccttcacctctaccataacaacaagatcaagaactagcatcaccagagtttactccaagacgagtaagatctttggtggacatgtatgaaacctgtaactnggtcatacttgaacctggaagc

SEQ ID NO: 18473 - DNA, 436 bp, Glycine max
  unsure at all n locations
tctcttggaagttcatcattggattggacttctactgtatgatcttcattgnttcctttatcatttccttttgaatcttgttcatcaatattcatatgttctaaagaatctgcaatatcatctagcatattctttcttgacaagatagcattagattcatcacaggtaacatgaatggattcctcgatattcatagttcttttattatataccctatatgctttgctttgtaatgaatatccaagaaaaatgccttcatcagattttgcatcaaattttcctagattatctttaccattattgagcacaaagcatttgcaaccaaaaacatgtagatgagaaatattaggttttctaccattatataactcatatggngttttctttanaatgggtcttattaaggccctattcatgatgtaacatgcagtattga

SEQ ID NO: 18474 - DNA, 382 bp, Glycine max
tctagctttgtatggtagaaggggtagaacacccgtatgttgggtagagcccggagaaggcctcaccttatgaccagaaatggtacagcaaaccactgagaaagttaagttaattcataaaaggataagaactgctcatagtaggcagaaaagttatcatgataagaggaggaaagatctggaattcgaggttggtgatcatgtattcttgagagtcactacatggactggggttggtcgagcattgagatcccgaaaactcacacctcactttaaatgtcctttacaagtcttaagaggactgtgcctgtggcataccaaagttgactacccccatctctttctaatattcacaatgtcgttgatgtgtctgaacttcgta

SEQ ID NO: 18475 - DNA, 386 bp, Glycine max
  unsure at all n locations
agcntttggcggcaaagggtaagctatcaagcctcaagcatgttgatgttggtgcttatgaacattgtatccttggaaagcagaaaaaggtcagtttctcaagggtagggaagactctgaaagctgaaaagctagaattggtgcacacagatgtttgggggccagccccagtgaaatctgttggaaactcacgctattatgtcacctttatcgacgactctaccagaaaggtatgggtttattttcttaaaaataaatctgatgtgttctctgtgtttaaaaggtggaaaacagaagttgaaaatcagacaggtctaaaggttaaaagtctgaaatctgacaatggtggggagtatgatagtcatgagtttaaagacttctgttca

SEQ ID NO: 18476 - DNA, 389 bp, Glycine max
taagcttatgctactgcatttgaataagtacatttataagtttatttgcttaaaatcaaatgaaatgtatgggattatctcgcttgaggtttcctttattgtaactcatcactttgtataatgctagcaatttcataaaggtcaaaatgcttgtggttgaccataacttcttattgcagggcactatgttcccgatgttattgtggctgcattaattggaattgtaactggttggtgcacaggccctctaatgcccatatgtgggcattggttagccaggtcatccatcttgcaatttctgctacatcttagtgtgtttgctttggcattatcatctcagttctttccttacactatgtctgcgcctaagaggattgtttttcagcata

SEQ ID NO: 18477 - DNA, 379 bp, Glycine max
  unsure at all n locations
nntgggctgaggacctatataacagttccaatgtttttgtttanggagttttttttcggagaggagaataattctaggattttagaatttcagtttttattactgttcatgcacactgttcacgtagaataaaattcattttttgcaaatcatctctaatccatacattttttaatattatgctctttttattttcttttgatatactttgtgctttaacgacttgaattcaatatgattttgtttatcaattatttttggatttgtacattacttatacgaaattttataagtttctttttttagttagtatttcactaggttttaaaataattaattaatcaaagacgtctntaaatagacttttaaataggctcgt

SEQ ID NO: 18478 - DNA, 386 bp, Glycine max
cgcttatgaagatacaataatactttttgcccaagcatgaagcccttcttaattatcatgctatcatggaacttcttggtctttacttagaagaacttggcattctcatacgcttctatgcggatctcatctaactcactcaagtgctactatctctcctcaacagcttgatccatcgagaagatgcaggtcttcactgcccagtatgctttgagctcaatctacactggaagatgacatgcctttccatagacaacgcgataaggagacattcctatgggcgctttgtatgcaatcctatatgcccaaagagcatcagccatcctagtgcgtcaatctttactgcttggctgcacaatcatctctaggcttctcttgatctccct

SEQ ID NO: 18479 - DNA, 397 bp, Glycine max
  unsure at all n locations
ctgcagcttttagncattcttgtagnagcnccaacgacatggattctaaatctttggtttcctcgactgccataacaatgtgctcaaatttaggatctaacgagcatagtatcttccccatgattcttacatgctctaaattctcaccatgtctttatacttgaggtgaaacaacgataattcttgaaaggaactgggaaatggacgtcaactctttcatatgtaatgatatagactctgctatgagcacatgcacagaaacgctctttagttgacattggttatcccagcctaccattttacggtggcgcgaacaggccaatatgatgacgtcgaagcgttagtctccaagggagaaaactagcagagtcaccaccaacgtgtatttgacgaaaac

SEQ ID NO: 18480 - DNA, 374 bp, Glycine max
  unsure at all n locations
aggcacctgctgagncattttaatttttacggctngacnggctcaaagacaatgatcatactaccagtgacacgatggataatcgcataaaagggcttcccagaggtcttgcaatggataaagacagggttaagaagcaaaacctctgcaaatcctatagccttctgcaatgcagaagcacttggtgcagtgaatagagtttttatgtcagtgccaataccaagggcagggtggtcaccaacactggggacagcatggctcaccatggtcagcatttcgggtgcgttctcactgtatgcaatgaccttgcatgttttctcatctaaggccaacaagcacccaagaagctgaatcatcttgcctttctgcatgtg

SEQ ID NO: 18481 - DNA, 358 bp, Glycine max
aggaatccgaggacctctttagatttggttatgaagaccgcaaataggctgttggagttaataaattcaccactgatttctttggaatacagcttttcctgaacaaaatggcaatcaatctctacatgcttagttctcatgacatacaagattagacgcgatgtgaagagctgcctgactatcagaatacaacttcatctgtggaacatcaaaaaattgtaattcttgaagttgtttaatccacacgaatacacaagtaacaagagccatagctctatattctgcttatgcacttgatccagcaacaacactctgttgcttgcttttccaatagacaatattcccaaagaggatacac

SEQ ID NO: 18482 - DNA, 441 bp, Glycine max
acctctcacaaaggagaagacaaagtaaataatgtgtgtctccaaactcttaagaggtgagtttgaatccttacatatgaaagagtcggagtccatttctgattatttttcaagaattcccgtagtttcaaatcaactagaaagaaatggtgagaagttaaaagatgtaagaattatggagaagatactatgctcgttagatcccaaatttgtgcacattgttgtgacaatcaaggaaaccaaagatttagaaactatgatgatagaaaaacttcaaggatcactgcaagcttatgaggagaagcataagaagaagcaaaagatcactgagaaaatcttcaagatgcaactaaaggagaacgaagatagtcgaggaaatgagagaagtcaacgaggtggaggtcgcggctgaagataggtacgacgtggaaacagtggacg

SEQ ID NO: 18483 - DNA, 385 bp, Glycine max
ttaagctttttaatattattttcgggcgctcgagcgaaacccattcttaccccaagcttttaataatatggccgcgatctgtcattacgtgcgactatctccactatagaaagaaaaaggagaagaacaagcaaatccacacatactattgtgataaatactagaaattatggctttctacatatacatatatacgtcattacaacgatacttatcaactgtagcaaagaatgaaacttcttagaagtcataatatgaagaaatcaatatgtctagatacccccttttctatggacaaaagagctaattgataaaggaagcatcgtactgatccattaacgcgcgtttgaaccgatacgataagaactgcttacttatctcatga

SEQ ID NO: 18484 - DNA, 391 bp, Glycine max
tcaagcttatgctgcaaacaattacaatagacctcttcaacctcaacagcaaaatcaaccacagcagaataattatgacctctccagcaacagatacaatcccggatggaagaatcaccttaatctcagatggtctagccctcaacaacaacaacagcagcctgctccttccttccaaaatgttgctggcccaagcagaccatacattcctccaccaatccaacaacatcaacagccccagaaacagcaaaaagttgaggctcctctgcaaccttccctcaaagaacttgtgaggcaaatgactatgcaaaacatgcagtttcaacaagagaccagagcctccattcagagcttaactaaccagaatgggaaaatggctacacaattaaat

SEQ ID NO: 18485 - DNA, 340 bp, Glycine max
agccttttgagaacggccagagaccagaccacttaggtactccaccaagcattccatattgcacgacgtgggactaaggcataccataacaccccagtccctatcactagctgacgactgcccaaactttttgagctatatataagccatatctcctatcgatgtgggactaaaccaccacacgtgcggttgcaattgaggcaaccgccacagaggccacaactaaggtgggctagggatgatagcaatgaacgctgatgtgcaacactctccctcgtgcacagagataccagcatggagagaggcacatgcaggaggcccaacaacagatctaggataa

SEQ ID NO: 18486 - DNA, 425 bp, Glycine max
  unsure at all n locations
tctaactntatacaggaatgaagctctgataccacttattggtttagtgacctcagatatcttaagaaggggggattgaattaagatatcacaaactattccccaattaaaaattctacttttaacttaacccaacaatccaagattccttttaaacaagaactcctagataataatgcaaattaatcttactaaataaaaaataataagcaataaacagtaaaggagtttaagggaagagaaaatgcaaactcagatttatactggttcggccacacccttgtgcctacgtccagtccccaagcaacccgcttgagagttccactatcttgcaaaatccatttacaagatctgaaccacacaaggacaacctttcttttgtttcagatttctttcaacaagaggccctcggtctcttaatccct

SEQ ID NO: 18487 - DNA, 338 bp, Glycine max
agcttttaaactttgtacaataataaagctactgaatagaagtggcctcagaaatcttaaagctctgataccacttgttggacaagtggcctcagaaatcttaagaaagagggggttgaattaagattttacaaactattcctgaattaaaatttctatatagattttgacccaagtcctaagattccttttaaaatgaatttctaaataataattcaaattaaacttactgaatagaaataataagcaacaataaataaaagagtttgagggaagagagaatgcaaacacagttttatactggtttggcaaagtccattgcttacgtccagtcccca

SEQ ID NO: 18488 - DNA, 410 bp, Glycine max
  unsure at all n locations
ntaggaatgacttggattatatccttggtgttctgcatttggtataatccatgcttcaatttagccaaaccaatcatcttcaaggacttcatttcctatatttggcaatgagaattggaaaaagtgagagagtattttagtgaagacaaaagcttggagattgaaataagattgaatttgaagtttggaacataaagaacatcatgtataatgaaatgtggcgataactgcacatttcctgaaatatgagcaaaaacaatggaaccattgggtaagtggatacgcacaggttgtattttggaaaagcttacaaaattatcaaaggaacatgtaatgtggtctgtggccccagagtcaataatccagggggtgcaattagaaaaacaatgtgcagtgtgtgcattagacaa

SEQ ID NO: 18489 - DNA, 357 bp, Glycine max
  unsure at all n locations
tggcatccaaaaccattgtggaagcaatatgttgagcttcagccattttggttttctgtagaaggtctcttatgtatttactttgagttagaagaatagagccatcaattagagtcttgacttcaaatcccaaaaaatagtccagcttcccaagttgtttaagtgaaaaattagaatgaagtttgataataaattgttggactaagttgatagaactaccagtgattataatatcatcaacatacaccaaaagataaatgatatgagaggtatctttgaaaacaaagagagatgggtcacacttgcttgcagaanaaccaagatgcaagagagtagattntagcctgtcaaaccact

SEQ ID NO: 18490 - DNA, 388 bp, Glycine max
actcagcttctatagaaggtcgtcctattttctactttgcttacctctcaatgagctggtgaagaagaatgtggcatttacctgaggtgaaaaacaagagcaagcctttgctttgctcaaagaaaagcttactaaggcacctgttctagctcttcctgacttttctaaaacttttgagctaaaatgtgatgcctctggagtgggagttggagctgtattgttacaacgtgggcaccctattgcttattttagtgaaaaacttcatagtgccaccctcaactaccccacctatgataaagagctttatgccttaataagagccctccaaacttgtgaacattaccttgtttccaaggaatttgtcattcatagtgatcatcagtcactt

SEQ ID NO: 18491 - DNA, 306 bp, Glycine max
ctcactatatggcgaatcgagctcgcacccggtgacccgtctagacgacacctgaggacatgcggctacgagagctcgattgcgccctatagagagccgtacgtcaacacactgatcgctgttttactgcttaaagactgatacaatcataacttcacacaacatactagccttacacatcatgcgtatttcctcagctgcctaattagcgaacatgctcacactaatcgcccttcgctaactgtgcgcattctaaatggcaaacctctcctgacacctgatttaatgattacgcctacgcgaacc

SEQ ID NO: 18492 - DNA, 236 bp, Glycine max
cgtgctctattgcgccatatagagagccggacgtcatcacggtggtcgctgttttactgcggaaagagtgatacgatcatgacgccacacaacatactagccttgcacctcatgcgtctttcctgaggtgcctaatgagcgaacatgctcacatcgatcgcccttcgctcactgtgcgctttctgaatggcaaacgctgcctgacgcctgctttaatgattacgcctacgcgaagc

SEQ ID NO: 18493 - DNA, 420 bp, Glycine max
  unsure at all n locations
tgtagaagcaaaaagccagttatggttntcaaggtggatttttatattgttctacgactcagtctcatggggtttcttggactacatgctgcaaagaatgagattctgtcccaaatggagacactggatttcaacctgcctcaattcagcaaccatctccattcttgttaatggcagccctacaaaggagtttgctcctactagaggcttgaggcaaggggatcctttagcccccttacttttcaatatagttggagaaggcatcacaggattgatgagggaagcagttcagaaaaacttatacaaaagttacatggttgggaagacaaaggaacccattaatattttacaatatgcagatgacacagtctttgtgggtgaagctgtttgggagaatgtcttagtttgatagctatgctc

SEQ ID NO: 18494 - DNA, 422 bp, Glycine max
  unsure at all n locations
ntaaaagaatggctaagattttgttaaaacataagctcttatacaatgaaggaaagctggagttgctgcacatgatgtccaacgttatgtcaaagaataagatcgggctgcacaatgcacaacgcatgataaagtgtcaaatgaagaattgaagctgcaggattcacgatgtcggatacaatgtccaggacatcctgcccgaaaatactggagttgctgaaagcattgaagctgcatgatccacgatgtcggacacgatgtcctgacatccggcccgaaaatactggacatataaatctgttatatctttaacagattattgtgcagttagcaagagatgagatgatctatctttaggaacgaattanaagataattaaagctcgtattacaaactacaagagtcgttcagggatgaaagat

SEQ ID NO: 18495 - DNA, 390 bp, Glycine max
  unsure at all n locations
tccttgagaatcttctttgagaagcttccttgagaaactagagcttagctacacatacacctctaatagctaagctcacctccttgagatgagaagctagagcttagctacacacacccctctaatagccaagctcacccccatgccaaaatatatgaaaatacaaaaaattccctactacaaagactactcaaaatgccctaaaatacaaggctaaaaccctatactactagaatgaccaaaatacaaggctcaaaagaaggaaaacctattctaatatttacaaagacaagtggacccaaccttggcccatgggctcagaaactaccctgaggttcatgagaatcttagggccttcttcagcagctctaacctacntcctttggagcc

SEQ ID NO: 18496 - DNA, 424 bp, Glycine max
tggctaaggctagactgcaatattcagcctctgtactggaccttgcaacaacagactgtttctttgaccaccaagaaactaaatttgagccaaaaatgatggctgcaccagaagttgaccttctgttgtcatcatcacagtaagcattaactgtaaagggaggtccagtagaaggagggagaatcttccaaccaaagttgatggtaccagctagatacctgagaattcgttttactgctgcccaatgctgctcagttggatctgacatgtactggcagactttgttaacagtgaaactgatttcaggtcgagtgatggttgcatactgcaaggctcccacaataaacctgtctagagtggggtcaggcaaaggctcataccctgacttagttaacttgaagcctcaaccattggagaagaaata

SEQ ID NO: 18497 - DNA, 422 bp, Glycine max
tcatccaacttaagcatggaaagaaggcattatattctcatacacataagatttctaaaaacttttcacccttatcgacgattgtaaaaagcttttaatggaagtcatgaaaatgaaggcccctcagaagcattaactggaaaccaagttcatgatcgcgtaaaggaaattgtaaccgtgtttggcaagtcccagaagaagacatcatctcccaacaacatgtggaagaaatgctcaatatttttgatcttccatactggtctgatctatatgtgcactgtctagatgttatgcatgtggagaaaaatgtgtgtgatagtttaattggtactcttcttaacattaaagggaagacaaaggatggtttgaaatttcgtcaagacttggttgacatgggaatacgagacagttgcatcccatat

SEQ ID NO: 18498 - DNA, 412 bp, Glycine max
  unsure at all n locations
tgaatcatgtgaaaataaatcaatcattctgtatatgtatcacaaattatatatattgataagaattacaaattaaaatcagcaaactcttaatttcgtttaattaatatgtgaaaacatttatgagctaagcttaacgtgaattaatctttttttaatccatataaattgaacacaataccataaatttataacattcatatattctactcaatcaactgaactaaaaccactgataactaattttaataaaatgatcatttatttttaccaatttcacagaaaaacttttgactaagaaaatttaacttaattggttgagcatgtgtgaattgctatanactactagttatgaacataaatatgtttataataacttatgcatgtgtgtccaatgtatctctgtataaac

SEQ ID NO: 18499 - DNA, 415 bp, Glycine max
tgcatgggtgcgctccgtctggcccgtgcttatacctgatgagagaagatcatcaagtttgagggctgttaccatggccatgctgatccttttcttgttaaggcaggtagtggagttgccaccttaggacttcctgattctcccggtgtccccaaagctgccacttttgaaacccttacagccccctacaatgacaccgaggccattgagaaactcttcgaggccaacaaaggagaaattgccgcagttttcctcgaacctgttgttggaaacgctggtttcattgttcctaagcctgattttcatagtttcttgcgcaagatcaccaaggagaacaatacccttcttgtgtttgatgaagtcatgactggatttcgctcgtcatatggaggtgctcaagatattttggcataac

SEQ ID NO: 18500 - DNA, 415 bp, Glycine max
tgaaggtaaaccagatgtctaggttaacctggtaacccatctggccgtgaataaaaaatctgcacctgtcgccagactctgtggtttatgctcctctgccgaccaccacacaaacctttgcccttctgtgctacaatctgaagcaattgaatatcttgaagcttatgctgcaaacatctacaatagacctcctcaacctcaacatcaaaatcagccacaacagaacaattatgacctctccagcaacaggtacaatcccgggtggaggaatcatcccaaccttagatggttgaatccttcacaacaacagcaacaacaacaataaccttattttcagaatgctgctggcccaagcagaccatacgttcctccaccaatctagcaacaacaacaacaacacagccccaaatatagc

SEQ ID NO: 18501 - DNA, 199 bp, Glycine max
agcgtctttcgtatcttgacactagctatccatctgacattcttctgagatcctaccttcgtgaattttccaaccgtgaatgactctaacaccacctctgccattcattgacttcatgcctgtcaccatccgatgtccacatctttgatgccttattccgacctcatcttctgtgcagaatacacgtgctgctgaatta

SEQ ID NO: 18502 - DNA, 381 bp, Glycine max
ttgatgcaacatatggagagttaatgaaacaacgatatttgcgctccatgagaggctggatcaaatggagaatagagatcataatgaagaagaaaggaggagaagagggaatgatggtgttcctagacaaaaccgaattgatggtattaaactcaacattcctccatttaaaggaaagaatgatccggaggcctacttggagtgggagatgaaaatagagcatgttttctcatgccacaactatgaggaggaccagaatgtgaagcttgccgccacggagttttccgactatgctcttgtgtggtggaacaagctacaacaggagagagcaagaaatgaagagccaatggttgatacatggacggagatgaaaagatcatg

SEQ ID NO: 18503 - DNA, 420 bp, Glycine max
taacaatcagtgtcatactattgatcaaaacaaagcttgtataaatatgcaatactagactcaaaatatgcaacaaacactatacctaaatcagtgtcacagaaatcggaagaaaatattttatccaagcacaaacttcaagccttattccatgtattggggggaagttatggctggccatatgggtagaggtgtcatagaggagcaagtatggaggaagggaccttggactgctgaagaggacaggttgcttgctgagtatgtcaggttgcatggtgaaggtagatggaactctgttgctacgcttgcaagtaagaaacaccaaactttattcactgttttgtttcttaatatatatgattggattttcacatttataactgacaatatagcataaaaacactgatattgttttcaact

SEQ ID NO: 18504 - DNA, 411 bp, Glycine max
cgcttctacagaaatgtagttgtcgtaacattatttccttataacagtaaaagtactgtcgactgaaacaataaagatctagccatattcagcaaatgctgatgctttctatccaccacaaaatactgcagtggtctatagggacaactgaattgatgcagggtaccctgctgttggagaaatgtacgcaatgccaattcaagagcattaacatatctgagctttttaatttgaaatccaaattgagtctttattaatgcaaaaaaatccttaaccttatgagttgcttcactcttagtatggagcaggtaaatccatgttaacctactatagtcatccacaatggtgagaacatagtgcattccttgacgtgtgactgtatgataaggaccccatactccacatgaatga

SEQ ID NO: 18505 - DNA, 325 bp, Glycine max
tttgatcgtctcgatatataatgcgcctgagtcgcacatccgagttaaaagttatgaacctttgaatatctcgagagcttccattgttcaatttcgagcgtctcaatatattatgcgcctgaatctgacctccgtgtggaaagttatgaccatttgaatttctcgacagcttccattgttcaatttcgagcgtctcgatatattatgtgcctgaatcggaccttcgagtgaaaagttatgaccatgtgaatttctcgagagcttccgttgttcaatttcggcgtctcgatatattatgtgctgatcggacatccagtgaaagtat

SEQ ID NO: 18506 - DNA, 307 bp, Glycine max
  unsure at all n locations
actcggaggcctatttggttcntatatatcgaaacgcttgagattgagcaacggaagctctcgtgaaatccaaatggtcataactttcaactcggaggtccgattcaggcgcttaatatatcgagatgctcgaaattgaacaacggaagctctcgagatattcaaatgatcataactnttctcacgtaggttagacttacgcgcataatatatcgagacgctcgatattgaacaacggaagctctcgaaaattcacatggtcataacctttcactcggaggtccgattcatgcgcataatatatcaa

SEQ ID NO: 18507 - DNA, 464 bp, Glycine max
  unsure at all n locations
actcgaagattacacgggtatcttctagccaatatatttctttgtgattatatatgnggaaatgagagatagatntagtagttggttgatgaacgaggtaatattatgaattgagttattctccaccatttgtaattatatgggtaaattataaacttaatgatgatttattttagtaattagaaacacaattaattagcaaaacgtgtgagaaagtcacgtgtgaactttcctttttttaatttattctcctatttatatactatagatatagatataaatgttataagtatacaataagattatctgactgtacagtaaaaaacagattatttcgattcttttgttcggctttaatttagttgaatctagatttttttgaatcataatagtgtttatgttntgaaatggttctaacaccctataaataactattgcctctaaatattgaactaaactaaatc

SEQ ID NO: 18508 - DNA, 319 bp, Glycine max
  unsure at all n locations
atggcgaatgtgcaccgactacactaatctgaacagggcataccccacaagacgtgtaaccctctccccaacatcaatanggtggtcgatgaagcgtccgaattcaagtgctaaccttcttggatgcctacttcggatacaactagattagaatgcatcctctagatgaggagaanatgaaattcataactaanaatgtcaacttttgttacaaggtcataccattcggcctaaaaaatgcaagcgcgacattccaatgaccaatggaccgagtcttcaacaacagatcggacgaaatgtcaggtatatatggatgaca

SEQ ID NO: 18509 - DNA, 436 bp, Glycine max
ttcttgtgttttgtaatggactcttctattgcttgagtctcacaggttggctaggggtgtttaactcatctgaacgcacttggagtgttctttcagtacctccacccaagtgcccagagaatttttttgccaaaaattggtggaagggaaaattcatgacagagcatgagggagatataatagtaatttatacatgttctagtgaaaatcccattatttttaagctagatcagatgttaatggaatgggaagagatgacaacactggatggagtaactctttttgctagtttcttgtcttctcatgcaaggattgatctccccggaataatgagaaatagtgtctacttctctaaagttcgtctttatggaaagcgctgcatatcattctctcttgatgactgtagatactatcctcgtaagcagtggcatgactg

SEQ ID NO: 18510 - DNA, 356 bp, Glycine max
  unsure at all n locations
tacacattatgttgatgcaaattggaagttgaatagtataatgcttaattnttctcattttcctcctccacactcanggcatgagatggctaaagtgatatantggtttttggaagaatgggggattgaacanaaatttttttcattaactctatataatgcttcttccaatgatataatgcacgactatntgaaggaaagactatctttgcatactaatggtttagtaagtggtggtgaattttctcatatccgatgttgtgctcacattttaatccttattgtcaagaagggttgaaagtagtcggtcctgctataaacaacattagagaaatcattaagtatgttagtggatc

SEQ ID NO: 18511 - DNA, 372 bp, Glycine max
agcttgtcttccaataccctgatgaggatgtcccatatgttcttaaaactggactgattcatttgcttccaaagtttcatggccttgcacgtgaagacccgcacaaacatttgaaagaatttcacattgtctgctccaccatgaaacccccagatgtccaagaggatcacatatttctgaaggcttttcctcattcattagatggagtggcaaaggactggctgtattaccttgctccaaggtccatcacgagctgggatgaccttaagagagtattcttagaaaaaattttccctgcttccaggaccacagccatcaggaaggatatctcaggtattagacaactcagtggagagagcctgtatgagtact

SEQ ID NO: 18512 - DNA, 409 bp, Glycine max
  unsure at all n locations
ggatccacggagaacaactcgcgatgtagaggctgcanagttgtgttaaaaaaactgtaagtntcgctatttaaaatacaagaaatgaggtagaaaaagaccagggaaaagagtgctattaaattatcataccttcacattaagaanatataanacaccaatgttttaaagattaaatatttatttcccttttgaatgggatgtgttagaaagatatgaataatatattctgatgttatatagttgttatatctattagatntatctttaatcatatctttagctattaggtttatcttcagttttatagttggtatatctattagaattatctntagccatatctnntagctatatatcnnttagctggaatctngtatataagcgaatgatgcttaatgaaatattc

SEQ ID NO: 18513 - DNA, 377 bp, Glycine max
aaaatggagggctgtgtattaatatcttactcattcacattcgtaaatatattcattatgaatttaataataatgcactagtgtaaaattatatatctacatgtaattacaaatagcatgacaacataacttataagctacttattataaaaattaataagcttattatatgataatttgtgattaaagctaatactgcatagtctttttttttcttctctagttatataatccttaacacatcctatattatttcgctagtaatgtaacagttatttatttatttcctgctaatccattttgcattttataatgtaacacgttgcttcctttccgcttgtcctgtattttcttcattatcaaaaagaaaagtatat

SEQ ID NO: 18514 - DNA, 236 bp, Glycine max
agcaataccattaacacgaaactgttgtgattcaagcatagaccgagtgagtgcgccaatggcagcgcgtggctagatatctgctgccaactactatcatcttgatggcgccacgaaacagatccaaaatcactccttgcgatgccacaagttcgctatcatgaggcgggagcgattcagtggcgcttaccttgcgacccgctccaatacgtgctcctaagacgaaccatggctct

SEQ ID NO: 18515 - DNA, 456 bp, Glycine max
  unsure at all n locations
tgagttgcatatcaatcttgccaaagagatactcgtttttggtctgattccccgagccanaggctttgtcaagggaaagagtgagaagatcgccgttgttgagtatcttggcacgaccatctccccaagttacgtcanaatcctggtagaagttgccagcagaggctgcgatggaagaggccaatacaaatacataaaggacagtttttgttgaaaatgtaatggaatgaagagaagccatgattggtttgaatganatgtagaaagaggaagttaaaaatgtagtagcttggtagaagtaatgaaatgtgagagaagaaggaagggatgagtgtggcggagaggtangatntgtactatttatagatgtgtggaagctgctatgactatcagggttacgcgtaggacaatggttagtgtgtctggaagagttggaacaaacattaaaatattaac

SEQ ID NO: 18516 - DNA, 448 bp, Glycine max
  unsure at all n locations
acgtactgataaagtatcacttaccttcgttaagtttttcatatagtactttgtacgtatttgaatgtagattgaatcacctaaaatcatacattgaaacaacaattaatatgaatttaaataaatgttagcatatttctcccaggttaagaaattgattctgagtctaattatgtttgaattacctttgattataaataatttattgtactcaaaaagtaatttttacttaaaagtaattttaggtaacttttgtatatgaaaaattttataccaaatttgactataacttgcttttaagataaaaatatctaanacctaagttacttcacttcaaaatcattntttataaaattaattttatttgaattcaatttcgtagattgatcacgtgtaanttatagtacctcaaacatatatagtgggatactctangcagcaaacacaa

SEQ ID NO: 18517 - DNA, 355 bp, Glycine max
tgctttcactgtcataagttagccatatgtaaagatgcaaagccagttacccagaggaagagaaagatggggaaagagaggtattatgtagtacaacaagaagtggtcaagttaatggccgcccaattcatcagagaaattaactactccacttggctttccaacatggtcatggttaagaaaccaaacgataagtggaggatgtgtacagactacacaaatctaaatcgagcatgctcgaaggatgcatacttactcccaaacatcgactgactggtcgatggagtagtcagacacaagaatgttgagtttttggatgcttattccgactataatcagagcaacgtatcaacat

SEQ ID NO: 18518 - DNA, 446 bp, Glycine max
  unsure at all n locations
aatctcagaactgcaaagacatgaccttatgatatttttagtaagaatgtcatacaaatatgagttacattatgaagcatgtcaaaaggggaaacaaattaaaaactatttttcaagcaaaaactttgtttccatctcaagaccacttgaactattacatattgatttgtttgcttcaactagaacaacctttatcactagaaggacataaggtctagtagttgtggacaactactcaagatggacataggttatggtccttgctcaagagaatgagtcctttgaagtcttctttaaattctgtaaaaaggattctaaatgaaaaaggagtatgcattacttcaatcagaagtgatcatagtggagagtttgaaatgagagctttcgctattatgtaagagaatgaaancttcataacttctctattgctgaacacctcaacaaaa

SEQ ID NO: 18519 - DNA, 346 bp, Glycine max
  unsure at all n locations
agcttctctcttttcttgtntaatnattatatnttgagtgtaagccttgtattttgctatgtttntatgacatttgaacacttagtatttcttttaaatatttgtttagtatgactaaacatgatgattacttgctcttggttgtttatggttatgagttttaaacttaattactttgatgatatatgattagtggtatgtactattatttggttattatgaatgactntctggattatatgacattctatgaagtattatctctctaagattgatgaatggttaagttatcttgtctgattgttctctattctcttgtatgaatagtaatctatgtatgtattat

SEQ ID NO: 18520 - DNA, 375 bp, Glycine max
  unsure at all n locations
agcttgtatttataaagtctcatgattgtcacgtgctcatgcaacaattgttggtcgtggctatatgagacatcttgccaaacaaagtcaggttagcgataactcgcctatgctntntcttccatgctatatgtagaaagtcattgatcctgtcaagtttgatgagttggaaaatgaggccgcaattatactgtgccagatggagatgtattttccccctgctttctttgacatcatgattcacttgattgtgcatctggtcaaagaagtcaaatgttgtggtcctgtttatctacggtggatgtacccgattgagcgatacatgaagatcttaanagggtatacaaagaatctatatcgtccagaagcatctat

SEQ ID NO: 18521 - DNA, 437 bp, Glycine max
  unsure at all n locations
agctntttatgtgttgctgtatccaatgaaaactctgggttctgcctttntatcaagtttgtcccttttaacctgtggaacataagagaaacaaacacaaccaaagatttttagaatttgtaaatctggtttgtaaccaaaccagccttcaaatggagtttttttgtgcaaaactcttgtaggtagtctattcagcaaaaatactacagtgtttgcagcctccgcccatagctcctttggcaactccttttcatgcagcatacaccttgtcatctccatgatacttctatcttttctctcactcacanccatttgttgtgggatgtaaggtacggtgagttggtgctcaatgccagcttcttcacaanaattatcaaanacatcattnttgtattccttcccattgtcagacctttattgttgcaacctgcaatcac

SEQ ID NO: 18522 - DNA, 318 bp, Glycine max
  unsure at all n locations
agcttgtattcctangatcttcatcaatggattccgtttctttttggaagatgaatggcagcagaatggagaacgaagagagagaggagacgccacttcaaggagaagatgagtctagaagaagctcaccaccataggaggccatggataagagcttggaggaagaaggagatgaatgaagggagaggaagagaatagcacganattttatgctctaaaagagctctgaaatctgaagtttaattttcaaattatcaaagttgaaaaaatgcacacacatgacctctatttatagcctaagtgtcacacaaaattgga

SEQ ID NO: 18523 - DNA, 393 bp, Glycine max
  unsure at all n locations
ggggaggacagatatagagtgaaattggaggaaatgcgttgattatatttcaagtggcttcagaaagccctgtattctcangctttcataactctcatattctggagctcccctatatttgtctcggcggtcacttttgctacttccatattgtagggtggtcagctgactgctggtggtgtactttctgctctggctactctcatgatcctgcaagaacctttgagggaatttccggacttggtgtcaacaatggctcagacaaaggtttctcttgaccgattatctggtttcctgctggacgaggaattgcaggatgatgcaactatcgtcttgccacaaggcattactaacattgctatagaaattaaggatggtatctttctgtgggac

SEQ ID NO: 18524 - DNA, 404 bp, Glycine max
  unsure at all n locations
agcttcgctaactttttgatcacgcaagaatgagacgtggttttaatatgtttactcctcccatgtgccatgagatgctagactaaattaattgctgatttgttatcaatcaacaacctcataggactacaatcccttaagtgcagttcttccattaaagctttcagtcatagagcttgacacgctgccatagcagcaacaatatattatgctttacatgttgacaaaacaactacactctgcttctttgagcaccaagagattagtgttgttccacatttgaaaacatatncagcattgctttactatcatgcttatcactacaccaatctgaatcatttataccaaacactgcttcttttatattcttctgaccgtaaggatataaaatgccaatatccaat

SEQ ID NO: 18525 - DNA, 341 bp, Glycine max
  unsure at all n locations
tcttcttacctgctgcatgtatgccntatactcgtgagttgttactngnnnnaaagctatagcaggtgcagcaatgtggatattgtgtggcccnccttgcattgatggaaaaacagcaaaattgatcttttcttcaatgtcatattgatcactatcatgtccctgacttagaagtatccctctcttccttggctatgtacccttacgataaaaaattatgcctcaccttggacctcgaagactctagtgagttgtcgaagtaacaatgtcacaataatcaataggattcacacactcctgcggagacaacaccaccatactattaaagaaataatgagcat

SEQ ID NO: 18526 - DNA, 387 bp, Glycine max
  unsure at all n locations
agctncataaattctctttgataccagaggatggcatgagcttcaaacagcttgcaccccatcctctgtagagacccttcagaccttcttctctaataacttctgaaagtgccgctgccatgtttggcgggcacttaccttgcaaagcacccaccatcaggcgcttccttgctacctgcaaggggaagctaattgtactggcagtaaaacctgcgcgagcataaagaagtcagatagcacaaatcatttatattaccaagtataaaatgtgattaataagtgacacgctgctgtgaaaaccatgtccgcccatcaaatagtgaatggctattctttcancaaatatntcatgctatcatttgcttcatgcaacatgggtgtgtgact

SEQ ID NO: 18527 - DNA, 353 bp, Glycine max
  unsure at all n locations
acatactgnaatcgattaccagaggagattttcagaaaatattctcaacagtcacatctttntgtgtggttcttgaatggctatcaaaggcctatatatatatgtgacttgagacacgaatatgataagagtgtttcagaacaacaaaggtcttatcctcttagaaagaaaaataaatttatcctcttacatattccttagccaaaactcttgtgattaaataaggaattatttgagtgctccaattgttcaatctatctctntatagagagaattcttcttctcttcttcttcattctgaaaagggattaagagactganggtctcttgttgtgaaagaattctaaacacaa

SEQ ID NO: 18528 - DNA, 356 bp, Glycine max
  unsure at all n locations
agctattaatttgtatgtccgattcaagcgcataatatatcgagacgctcgaaattaaccaacggaagctctcgagaaattcaaatggtcataacttntaactcggatgtccgattcaggcgcataatatatcgagacgctcgaaattgaacaacggaagctctcgagaaattcaaatgttcataacttttcacacggatgtctgattcacgcgcataatatatcgagaccctcaaaatttaacaacggaagctctcgagaaataccaatggtcataacttttcactgagatgtccgattcacgcgcataatacatagagacgctccaaatcgaacaacggaagctctccaaaaat

SEQ ID NO: 18529 - DNA, 338 bp, Glycine max
atcttttggttggacatcttgacttgctatccaatctgacattcaccacagattcttgccttcttctattttcagaatgggaatgcctctaacagctcctttgtcaatgaatttcttcatgcctcttaagtgcagatgtccaaatctttgatgccatattttcgacttcatcttctttggagaatatacatgtggaggagtaactggcttcttgaggtgtccaaggtaacagatgtactttgatctgctggcctttcttagaacttcactcttctcttttgcaccaacattcttgactttgtgaagttacattgaatccttcatcacacagtgactga

SEQ ID NO: 18530 - DNA, 401 bp, Glycine max
  unsure at all n locations
ttctttaattcattatggatgcataagcaaagagcattctaatggcttctaatcttgcaactggagcatatattcttcataatctataccttcttcttgattgtatccttttgcaactaatctagcctaatttctaatgattatgccatgttcatctcacttattcctaaatacccattttgttcctatgatggggtagtttttaggtttctctactagttcccacacattgtttcttttaaactgatttagttcttcttgcatagcaattatccaatgatcctctattatggcttcatttatatttttaggttcaatcagagacaccaaagccatattattgcatanatctttaagagaatgtctagttgttaccctttttgagatatcaccaataatgt

SEQ ID NO: 18531 - DNA, 289 bp, Glycine max
  unsure at all n locations
gaacaacctgcagtncacatgcgtcggtggagatacagcagccctggaccaccaccagtaatgatcgtgtatcttggatcccaagtaagtagtttcttcttttgatgttctttttcaaacaaaagcttgtctaggctcccgtttggtacatagttgtaaacaatgaggagttcatccttcttcctgcaccacccatgtaactgcaccaaaattctatgctntagttgtgccatgcctgttatttctgaaacaaattctctgattccctgccttgaatcaggagcaactc

SEQ ID NO: 18532 - DNA, 343 bp, Glycine max
  unsure at all n locations
ttcttatgatcatgaaacctttctccaccaagcgagagagtaacatcaaatgattcctcatcctctaacaacatcccaaaatgttcaccaatatcagattcangaacctgtattgtgtntaactgagaagaatctatggacgacactaanaccgcaatagtgcaatttatcttcaagcaatcatccttgagaaaatttgacgtctcaaggtgtctccgtttgaaaaaccgcgtatagcccctattacacaacaagtgcatcattgatcactacctaatgtacaccaacaaaaatggataccagagctaataaatcatgatgatatccaatcatatcaccaaat

SEQ ID NO: 18533 - DNA, 447 bp, Glycine max
  unsure at all n locations
gagttcctagcttagcccataatgttttccagaagtggtaattgtcttagtatctttatctgacacagtggtcctatgcaaaccatggagtctcacaacttccttgaagaaaagtttgagatgtgagaagcatcatctaccatgtggcatggtatgaagtgtgccatcttgctaaacttatccaccacaacaaagatagagtctacanccttttgggttctaggaagcccaaggacaaagtccatactaatgtctacccaaggtgtagatgggatgggtaagggtgtgcatagcctatgaggcatcaccctagacttggcttgtaaacaagccacacatctagtgcaatgcttatgggcatctttctttatatgggaccaatagaacttttctttgagtaagacaagggtcttgtctatcccanagtggcccatgagccaccctcat

SEQ ID NO: 18534 - DNA, 445 bp, Glycine max
  unsure at all n locations
tcagctntgtccncaatacttcatgtagacttgtccaatatcttatattatacctcggattccctttggatacaatactggaaggaattccatgcaactntactacttccttaatatacaactccactagcttctccatcctatactntatattcactggaataaaatgagcagatntggtaagtcgatctactatgacccatacagcatcatgtccccaactagtcttaagtaaactagatacaaaatccatggatatgctctcccatttccattccggaatttctagtagcttcaattctcctgatggtcgctgatgctcagccttagccttttgacatgtcaaacacctcgctacatattcagctacatctttcttcatgccatgccaccaaaaacttctcttcanatcttggtacatcttagtcattcctggatggaaact

SEQ ID NO: 18535 - DNA, 423 bp, Glycine max
  unsure at all n locations
agcttcttttttcattttcaagcatctcgatatattacgggactcaatcgaccatccgagtcaaaactaattgtcgtttgaatttactcaaagcttctgtattcaatttctggcatctcaatatattaagggactctatcgaacatctgaggaanaagttattgtcatttgaatntgcttggagcttctgttttcaatttcgagcgtcttgatatatgatgggactcaatcggacatccgagttcaaagttattgtcgattgtatctgctcagagtttcagtgttcaatttcatgtatctcgatatactataagacttaatcggatttccgagtaaaatgttattgtcgcttgatttgctcaaagcttatgtattcatatcaagcgtcttgaattattatatgcctgattagacatctgagtc

SEQ ID NO: 18536 - DNA, 317 bp, Glycine max
agccatgattgattgatatttttaacaataatattttcggagtaaaactattattattaatatgatctataatattataattatttaaaagaaattatcaaattattttagtggctttaatgattagaatcattttaattgtttgagataagttaattcctataaacatatatatgggttatatgaataaatgtcttctttttctcttgaaggggcttacaacgctttgataacatgtcattgtgatgtttgtcgaccagttttggccacatcttgtggtttaaaattatcttatatttgaatctttgacattgtaa

SEQ ID NO: 18537 - DNA, 384 bp, Glycine max
  unsure at all n locations
agcttcctatagntccgttccttcctctctcgatatgagaccgagtctggcactccacattagtacattcaccaattataaaagcatcaactctgtcatacggaatgagggcaacctcatcatggtgctcagcattaccaaacttggtccaagtcaggtcagcaacacaaaactcctcctcaggtgggtcttgcaaaggaatcttccccacggattcaactatagccatatccaaaatggcacaaaaaccaaaaaacacaaaaaccttccttgctatatatacagaacaatctagaagtctctccacaaacactcacatgtccaaaacagttaaactgttaagcacataacaaaacaccctgaaacaacaaatacctttgagat

SEQ ID NO: 18538 - DNA, 326 bp, Glycine max
agccctgtatcaaatcaagcttagagaaataccttgcgccacccaattcatcgagtaactcatcgatcgtcgaaattgggaaccggtctctcacggtcaacgcattcagtgccctgtaatcgacgcagaacctccatgaaccatcctgcttcttaaccaacaaaacaggagaggaaaaggggctagagctgggctgaataaggcccttttgcaacattgaatccacctgagactcaatctcctggttttggtaatggggataacggtatgggcggacattgaccggaggtgcttggggaaggagatgtatgtggtggtccgtgtca

SEQ ID NO: 18539 - DNA, 325 bp, Glycine max
  unsure at all n locations
acctgtcgcagggtgggggtttggctcctctgctgaccaccatacagaccttngcacttccatgcagcaacctgaagcaattgagcaccctgaagcttatgctgcagatatatacaatagacctnctcaacctcagcagcaaaaacaaccacagcagagcaattatgacctttccagcaacagatacaaccctgcatggaggaatcaccctaacctcagatggtgcagccctcagcaacaacaacagcagcctgctccttccttccaaaatgctgctggcccaagcagaccatacattcctccaccaatccaacaacagcgacga

SEQ ID NO: 18540 - DNA, 335 bp, Glycine max
  unsure at all n locations
agctttctctattgttcttgatanaagaagagcaagacggttaatcatggtactttgacatcaagcggtacgtagagtataaggagtatccacaaggggcttctgaccatgacaagaggacattggtgaagttggcaactagttcctttttaagcagaggtatcctatacaaatganatcatgatatgggcttgctctgatgtgtngacacttaagaagccgagcgaatgctcatggaggtaccatgaagggtcctttggatgcatgctaatgtgcatgtcatggctaggaagattctaaggcagactataactggctcaccatggaaaatgact

SEQ ID NO: 18541 - DNA, 474 bp, Glycine max
  unsure at all n locations
tcatgttaagtatgtatggcanaacttcattactgttgttcttgacatacaagtgagcttgtaacanatcttctagacttggagtgatcacatgcagtcctcttgaacccttaccactcactctatcattatgctgagactcaagaaggccaataggtttagccttctcaatgtattctgaacaaaatccaatggcttcttctacaatgtacctctcaacaatagatgtttttggatgatatagattctttgtatacccttttaagatcttcatgtatcgctcaaccgggtacatccaccgcanataaacaggaccacaacatttgatttctctaaccagatgcacaatcaactgaatcttgatgtcaaagaaagcaaggggaaaatacctctccaactggcacaatataattgcagcctcattntccagctcatcaaacttgacaggatcaacgactntgctacttatggcat

SEQ ID NO: 18542 - DNA, 341 bp, Glycine max
agcttgaattctaactggatgcattggttaacttggtaacccagctggccttgaaccaaaaatctgtacctgtcgcaagggtctgcggtttgtgctcctctgctgaccaccatacagacctttgcccttccatgcagcaacctggagcaattgagcagcccgaagcttatgttgcaaatattttcaatagacctcctcaacctcagcagcataatcaaccacagcagaacaattatgacctctccagcaacagatacaaccctggatggaggaatcaccctaatctcagatggtctagccctcagcaacaacaacaacagcctgctccttcattccaaaat

SEQ ID NO: 18543 - DNA, 315 bp, Glycine max
atctctatatctttaaaggttatcatataagcttttaagatatctttgttatctctaaacatcttaataagaagctaaagtattatattgtattataaaggttattttattgagacccgcatatatcttggtagactaagatcaatacatgtggtaataagtttccaagtcttggaaaatattatactaatattttattgagttgtataaagatacttacttggtatgaaaatcatgtttcttatagcttacaagaataatatttcggctataattacatctgttaatggctcaagctaaataattgaactttga

SEQ ID NO: 18544 - DNA, 400 bp, Glycine max
  unsure at all n locations
agctngtattccttatatcttcttcatcaatggagtcctttgcttcttgaagatcaatggtagtggaatggagaaggaagaaagattattggagacacgaattcaaggagaagatgagtcatgaacaagctcaccaccataggaagccatggataatagcttgaaggtaggagaagatgagtggagggaggaggagagaatgagcacganattctatgcctcaaatgaggtctgaactttgaagtgtaattctcaaatgatcaaagttgaaatatattgcacacataagacctctattattggctaagtgtcacacaaatgggagggacattgaattttacttgatttgaattgaattggggagccaatttggagccaaatttcactaatttgttaatga

SEQ ID NO: 18545 - DNA, 442 bp, Glycine max
  unsure at all n locations
ctaagcctcgcgaccaggggtcttcgtaatagaagagacatacggctattagcctgtgcttgttcggagagatcgtcatacatgattaaagtgtgacgttcacggtacataaaatattcagccagagctgctcctgtataaggggcgaggtattgtaatgtagctggagaatccgctgtctcagctactacaatagtgtattccattgctcctctttcttgtaaagtattcaccacttgagccacagaagatgctttttgaccaatagctacataaacacatattacattgtgtccctgttgattgagaatagtatctgtggctactgctgttttacccgttagtctgtctacaataattaattctcgttggccacgtcctatggtgatcatcgaatcaatagcaataagtcctgttagagaggctcatatacngaacgtct

SEQ ID NO: 18546 - DNA, 479 bp, Glycine max
  unsure at all n locations
tcaagctggtcaaanagggaaaccaagttaaaactcatttcagagcatattcattatttctacttcaaaaccccttgatctacttcacattgatttatttggtccctctagaactatgagtttaggtggaaattactatggcttagtaatagtgggtgattactcaaggttcacacggactttgtttttgaaagccaaaaatgaagcttttgatgttttttgcaaacttgccaaggtgattaataatgaaaaaaggtcttaacattgtttcacttaaaagtgatcatggaggtgaatctcanaatgagtcttnttaaaacttttgtgaagaatatggaattcaccaatatttttttgcccctcagaacacctcaacataatggtgttgttgagatgaaaaatagatcccttgaagatggtgcaagaacctttctaaatgaaacaaagttacctaagtactnttgggctgatgttgtaca

SEQ ID NO: 18547 - DNA, 335 bp, Glycine max
  unsure at all n locations
aaaatggtgtatcaaagaggcgtaatacaactttaatggatatggttaggagtatgttaatcaattagactttacccgtatctttgtggatgtatgccttgaaaactgccatgtatttgttggacagggttcctagtaaggcagttccaaagacaccttttgaactatggacaaataggatacctagtataaggcacctgcatgtttagggttgccaggcagaaataaggatttataattcgcaagacagaatattggatgcaagaacaatcagtggatatttcattggttatccagaaaagttaaaaaggtatatnatttattgttctaatcat

SEQ ID NO: 18548 - DNA, 383 bp, Glycine max
  unsure at all n locations
naagcttttttatgttatgttgcctttaaaagatgttgacagcatatgaatagaccagcctctggccatatgttattaagtattaattacgagcatacttaggcctaccaaaatttaacctaatcaggcctatttcaaccggtagttataaatatgttaaattaatttgtaagtctttatattatttaataaatttaatcaagttctttaattatatatttcttttatatgagtctatgaacttgcatttatattctaaataagtcccgttattcttaattagttccttgctaagacctaattaaatattagatacaagtctaacgatctaattgataaaaaagctaagaattatttaaaaataaataatagttcaaagatta

SEQ ID NO: 18549 - DNA, 408 bp, Glycine max
  unsure at all n locations
tctgcgaagccacatgattattcatgtctatctgatgtaaccccttccttattgtagtgaggagccggatcttcaaaaggcaaggacaatccctggcctaggaaatccagtgcccatactctagtgtcacgccccagatctctcagttgcttctcataatggaaagagccaacaccaaaaccaggaagaaagagaacatgtggggaatccacgttctcacaccctgccttctcatagtacacgttaagcttaggcttccattcccaaaagcaactacttattggagcanccattgacccatctggcagacctggaatgacaactttgttagtagcaaggtcttctacccctgcaatatctgctacatnctcttcancaccaattacatatccatcgcaactttcacta

SEQ ID NO: 18550 - DNA, 456 bp, Glycine max
  unsure at all n locations
ggattnntttacaggagaaatatcatttagattttgtgtattananaataatccgaaaatctttgaaatatttacagttcaaataaaattacattccataaaatgatattttatgtaactaaaacatataagtaatatatttagatataaatatacaagtactcattcaagtgagtgagaacaatttgttatcccattaagattagatctaatatgttttatgactgtacaattatggatacaatacctcatccattgtcaatctaattatgattatttctctttgtattgttcacaatttgtatctntgcgaatgtgttatgtccttcaaaattattgatatattcccttccattgtaactaatctctaacaatagcacacccaattgaaactctatgttttgaaaattatttgaaacaaagaatgataattgttaacaaaaatatgatgacata

SEQ ID NO: 18551 - DNA, 406 bp, Glycine max
  unsure at all n locations
agcttgacgaactttctatattcatatagtatttgcctncagaagtcccattggcatctctgtgtttcaaatggtgtacgaaaaagtgtgctacctaccaatggagtaagaaattaaagctcattatgccatgatgttcctcaactatatctatatatcatccagagagaaaaggaatgtataactacaataacttacaaaaatatgccacaacgcatatgatatatccaaactctacaaacgaagaacccatatgaaccatgacaacacaatcctctacagagaatgtatgcccanactactattagtgctctacaactcaagattaaagatgtttcttggaaaataacaacaagacggagtgtgctctttactatccaagacattaagccatatggtggtatat

SEQ ID NO: 18552 - DNA, 288 bp, Glycine max
gctccttcaactgcacaaggctcttaatatatgaagagtttttttgtggaatcttcactttatgaagacactgacaaagactaatcttctacttttatgacaaagtatgacaagctgtgggcaaataaatgttcttcccatcagaccttggatgcaactgtaatcgtatcctcatttgagctaaatcttaacgaggattcaagccatcctttgtcttgcctcgaatgttaaagagcatcccaatcacactgtcacatacatatttctgtacatgcttaacatctatac

SEQ ID NO: 18553 - DNA, 355 bp, Glycine max
agctttgaccttctgaatttttatgacttactcagccagatgaggcaacactcttcagcttttgcggatggactccagcgtttggctcattactttgccaatggccttgagacaaggttggctgctgggaccccatcatacatgcccctagaaggaacaacttccgctgatatgttgaaagcttacaaactatatgttacatcctctcctttgcagaggttgacaaattatttggcaacccagacaattgttagtcttgtggaaaatgagggcagcggtcatattattgattttggcatttgctatggttatcagtggccatgccttatcaagaagctctcagaaaggcatggtg

SEQ ID NO: 18554 - DNA, 432 bp, Glycine max
  unsure at all n locations
agcttattcactttgcactctatagaagtgttagattgttgaaatccaggagcctgagacaagtaaacagtctcattaagtaagccattcagaaaaatattattcaaatctaattgagcaagatcccactgatttgaaatggctaaagtaaaaataagtctaatagtaattggttttactactggagaaaaggtttatgaaaaatcaaacccttggacttgattcaatccagtggcaactagaggagctttatacttatntattgaaccattttcgattttttcatcctaaatacccactggccttccaattagatgaaagaggtactagtttccaagtatgattcttcatcaatgcttcacaatctagttgcatagatgacaaccagtttggataagtcaggcatgttcacattctttgttcacaacgagt

SEQ ID NO: 18555 - DNA, 303 bp, Glycine max
  unsure at all n locations
tatgatactcagctttatnaaggttcgccctaatttctctactttttcctcacctctgaatgagctggngaagaagaatgtggcatttacttgtggtaaaagacaagagcaagcctttgctttgctcaaagaagagttcactaatgcacctgttctagctcttcctgacttttctaaaacttttgagctaaaatgtgatgctcttggagtgtgagctggagctgtattgttacaaggtgggcaccctactgcttattatagtgataaacttcatggtgccaccctcaactacaccacctatga

SEQ ID NO: 18556 - DNA, 443 bp, Glycine max
  unsure at all n locations
agctntgatggtgtcgagattatatcacatgtttgtcatcatcaaaaagagggagaatgtgaatgtatgtatacatgattntgatgatgtcaaagaagaatctaataaggctgcttcaaatgataagcatttgcttcaagaataattcaagattgcttcaacaaacaaagccttgtttcaagattcactaaagaccaagtcttgccttanaacaaagtgctttcaagacatgcaaggctctggtaatcgattaccaggagatgtaatcgattaccagaagacagggttgagaaatagctgttgaaaaatgttttgaatttgaattttcaacatgtaatcgattatcatatgtctgtaatcgattaccagcaacgaaactttggaaattcanattcaaaagtcataacccttcanattataactgtgtaatcgattacacaaac

SEQ ID NO: 18557 - DNA, 394 bp, Glycine max
  unsure at all n locations
gctcgttgagtcatccaaatcattntctttcatacagtttatgatgcatccagcaataagttcatttccaaattcacacttctattttaaccaaattcttgatgctccaaatgttgtgagaaagaactacagaaaacaatatcttccagggccaatgtttgggccctattcctttataaatgtagttggtggcattgaagagtttgatgatgctggacgaagccggacaaatatggttgaagtagcaattgtgatgaaaataattaaaaattgttttaaagggttgtgtgtgtatgcgaaatctcagtagtgatctatcattttagtgtattttcattctccttgagaaagactatacttgtcaaaagtgaaaattttcattatttccactact

SEQ ID NO: 18558 - DNA, 409 bp, Glycine max
  unsure at all n locations
cactctacaatacacacgcttctcaaagatgtacttaaccaggtccatcttggatatcaaccatgtggtatggttcagcatgtattgtcttagacggtgggacgcccagactaaagcacaacacgttctttcgagcagggagtagttcatttcataggccgtgaactttttactcaagtagtagacagcgcgttctctcttcccggactcgtcatgttgccccaacatacatccaatcgactcatccaaaatcatcatatacaagatgagaggccttcctggtaccaacgacataagcacgagagggttcatgagacactgtttgatccttccanacgcctcttgacaatcctcattccaacggacgggatgggttttgcgtaagagttggaataacggctcacaatta

SEQ ID NO: 18559 - DNA, 435 bp, Glycine max
  unsure at all n locations
agcttagccactcagttggcaagtgtatcagctgcttcctgtgtggatgcctcagcatacacacgaacaacatcttcagtgccagatggtcgcacaaagcatcgaccttgggggtccttagctgtaaatgcagaagaggaaagagtatcaagctgcaatattagtaaactgaaattctgcactttaatctttcacactaaaaggctttcatggatggatgaaactgacaaatatctcgcagtcagtgaaattttgccaagccacttggacttgataacagtaatagtataatcccataaacaagacaccaacttttcagagatataacattcaattntggtattatttatgcctccttgcctccctcactctgcccattcttggtggttcacanataanagcaagcaagcaatgatataaccaaaaaacaatgtt

SEQ ID NO: 18560 - DNA, 280 bp, Glycine max
  unsure at all n locations
tattgctaaatgctaatcaatcagcaattctcacagaaatcatcttgttcctgacaatgttagaaaccatcanaccatggccatatataactgtgcaagcatgatagaaaacaaattataaaactattagaaatgaatgaggaagtntgacaaaataataagacaaataccttttcattgtatatacgaaagccttctttgactactgctntagtatcatctgaccgagtaatgagctntgacatacagtgtgcaggaagaagaagtggagccatgacca

SEQ ID NO: 18561 - DNA, 376 bp, Glycine max
  unsure at all n locations
agctnttaagttaaaggatatgactcttcacatttgaatatgaatttcaacattcaagggcactagtaattgattaccaaaacattgtaatcgattatagctttttgaaaataattggaacgttgtaaattcagtttgaaaactttttcaaactcattttgctactggtaatcgattacaacaatatggtaatcgattaccagagagtaaaaactctttggtaaaaggttttgtcaaaaattcatgtgctattcaaagtgttagtgcttggctttactgagttttaaaagaatggctagcatgttgttaaaacataagcacttacacaatgaaggaaagctggagttgctgcacatgatgtctaacattatgtcaa

SEQ ID NO: 18562 - DNA, 415 bp, Glycine max
  unsure at all n locations
agctttatatttgtntgttcctaatttctctacaattgcatcacctctcaatgagctggtgaagaagaatgtggcatttacctgtggtgaaaaacaagagcgagcctttgctttgctcatagaaaagcttactaaggcacctgttctagctcttcctgacttttctaaaacttttgagctagaatgtgatgcctctggagtgggagtaggagctgtattgttacaacgtgggcaccctattgcttattctagtgaagaacttcatagtgccaccctcaactatcccacctatgataaagagctttatgccttaataagagccctccaaacttgggaacattaccttgtntccaaggaacttgtcattcatagtgatcatcaatcacttaagtacattagaaggcaaagcaagtta

SEQ ID NO: 18563 - DNA, 341 bp, Glycine max
  unsure at all n locations
gcttaacattcaatttcgagcgtctcgatatattacgagactcaatcttacatcagagaanaacgttattgtcgttggaatttgctcagagcttcaacattcaatttcgagcatctcgatatgttacgggactcaatcagacatccgaganaaaagttattgtcgtttgaattagctcagaagttcaacattcaatttcgagcgtctcgatatgttacgggactcantcatacattcaagaaaaagttattgtcgtttgaatttgcacagaggatcaacattcaatttcgagcgtctcgatatgttacggngcttaatcagacatccgagaaaaaattatt

SEQ ID NO: 18564 - DNA, 445 bp, Glycine max
  unsure at all n locations
tatcgtaaccgattacaccaatatttttgagacaatgattgatttttaggagtctctgctntaatccattaccagtagatataatcgattacttctctcttannaagtgtntcagaagtgatcaagaacactttaatcaattacatcnaaaatctaatcgattacatttgtctttgaagttttccaatntttgggaagaacactntaatcaatcanaatggtaataatcaattacttctttgaaataatngattacattgtatatntaattgattacaggcagttattacgagctggtataagctagaataacattattagaaaatatgttttttacatcggttatttatgactntcaacatcngtttttaaaatcgatgtgaaagtaccgaccgtgatagtattattggtaacatcngttttttaaaactgatgttacgtaaaa

SEQ ID NO: 18565 - DNA, 399 bp, Glycine max
agcttaagattaatctcaaagttgcaaaagtacaaccttgtaagagactgagtatgtcatgcaaagatgatttacattttgaatcttgtcaaaagggaaaacaagttaaaaaactctttttccagtaaaaatattgtttccacctctagacctttagagttgttacatcttgatctgtttggcccaacaagaacaacctcaatatgtggtaaaaggtatgaacttgtcatagtgaatgattactttaaatggacatgggtaatgttcttagcccacaaggatgagtctttcaaggtcatctaaaaattttcaaaatagattaaaatgaaaatggagcattgtcgcaacctacccttcgtcgggagggcgacgcgagactcacgggtgcatcttccatgg

SEQ ID NO: 18566 - DNA, 347 bp, Glycine max
  unsure at all n locations
agctttaagaatatttgcaacatcgttntggatatttaacaagaacattctatttcttgacattggtaccttggtaattagattatttctcccatctctgatggaaagactagaatctttcatgtgaatatcatagccttttttgagtaattgtcccaaactcacaatattgttcttcatatttgggacgtagtagacatttgatatgaattcatgtcttgcatccttcanatggattatgatcttaccttctgtcttttatacgaatcttggaattataacagattatgcattgccacttactgactcatcaagatccacgatcatgctttcttctcacacatatg

SEQ ID NO: 18567 - DNA, 440 bp, Glycine max
  unsure at all n locations
agcttgttaattcgtggaagctcctaatatctcccacactttttggggtgggccattcttggatggccttgattttctcaaggtccacttggaccccatttctacctactacaaaacttaagaaaactatattatctacacaaaaggtacatttctctatatttgcatagagggtgtttttcctaaggactgaaagaactttcctaagatgtcctaagtgatcatctangctcctactgtatactaaaatatcatcaaaataaacaacgacgaatctacctatgaaatcccttaagacatgatgcataagcctcataaaggtgcttggtgcattagtgagcccaaaaggcatcactagccattcatacaaaccaaacttggtcttgaaagcggttttccactcatcaccctttntcatcctgatttggtgataaccactt

SEQ ID NO: 18568 - DNA, 382 bp, Glycine max
  unsure at all n locations
agctaacaaaatanttattgtatttagctggctnaaatcaaggcaaggtgttgtgtctaaacaataatctatgcctgaatcaacttacaaataatcttacaataatgagaaaaattaataaacgagttctatatttaaaacaaatatactaacattttacaacagaaaaatagactatataccatacgagataattatcccagctctataatcatctaaaatatgggtacaattgtataacatataattataataatggtgtgagtaatccacacttatataattacacactcatgtaaccattacgagatatgaaagaaagaaatatgctcaaacatttctttatcatattcaagtaatatgttctacatgataagttaca

SEQ ID NO: 18569 - DNA, 438 bp, Glycine max
  unsure at all n locations
agcttaataacccttcttgtagagtatcaagatgtctttgcatggtcatatcaagacatgcccggtctggattccgacattgtgcagcataagttgcctttgaatcctgngtcttccccggttaagcaaaagttacgaagaatgagacccaagatgtctttaaaaattaaagaagtaaggaagcaatttgatgcagggtttttagctgtggctcggtacccagaatgggtagccaatattgtcccagtcccgaaaaaggacggcaaggttcgaatgtgtgtagactaccgggacttgaaccgagccagtcctaaagacaattttcccctaccacacattgatatattggtagataatacagccaaattcgtccttttctcatttatggatggtttctcggggtataatcaaataaagatggcacccgaagatgtagag

SEQ ID NO: 18570 - DNA, 389 bp, Glycine max
  unsure at all n locations
ntccgccaatggtatttgaggtttaatgataccattatctcctttatatataaggaaaatattgtttatcggtgtatgtatctgaaggtcagtgggagtaaggttattttctaattttgtatattgataatatcttgtttgcagctaacgatcttggtcttcttcatgagactaagaaatttctctctataaactttgaactgaaagatatgggtgacgtaagctatgtgatacggatagaaatattccataatagatcataatgattgttacgcttatctcacaaagtacatatatccataaagtgctacagaaattcaagatggacaggtgtttaacatcgcctattctaatgtataaatgagacacatttattctcacaccaatgc

SEQ ID NO: 18571 - DNA, 247 bp, Glycine max
  unsure at all n locations
tatgctgcanacacttataatagacctcctcatcagcaaaactctcaacaatagaataattatgacctttcaagcaatagatacaatccaggttggaggaatcatccaaatctgagatagacaagtcctccacaacaacatcagcctgtccctcctttccaaaatgctactggtccaagcaagccatatgttcctcctccaatgcaacaacaacagtagcagtcacaacaaagacaacaagcaactg

SEQ ID NO: 18572 - DNA, 397 bp, Glycine max
agcttctctcttttcttgtataattattatattttggttataagccttgtatttggctatgtatttatgacatttgaatacttagtatttcttttattattggattagtatgactgaacatgatgatcatatttacttgctcttggttgcttatggttatgaagttttaaacttaattattttgatgatgtatgactagaggtatgcatttttatttggttattatgaatgactttctggattatatgacattctatagagtattatctgtctaagattgatgaatgattaagatatcttgttagattgatttctattcttgcgcatgtcatttatgtatggtaattatatttcttacctctctaagtttgatgaatggttaacatatcgtgcttaa

SEQ ID NO: 18573 - DNA, 431 bp, Glycine max
  unsure at all n locations
agcttaagcttcttcaactgcacaaggctcttaatatttgaagagtatccttgtggaaccttcacccgatgaagacactgacaaaaacttatctttgccttcttggacaaagtatggcaggctgggggcaagtaaatcttcttcccatcagaccttggatgcaactgtgatcgtatacccatatcagctagatcttgatgggtattcaagccatccttcgtcttgccttgaatgttaaggagcgtcccaatcacactgtcacaaacattattctccacatgcataacatcaatacaatgtctaacgtcaagatcacgccagtacggaagatcacagaagatggacctcttcttccatatgcaacgctgactnttatccttcttttgggtcttcccaaatactatattcaggtgttgaacccgttgatatac

SEQ ID NO: 18574 - DNA, 386 bp, Glycine max
  unsure at all n locations
tgttntaatgtgttataagaaccaatgctcctatcaacaggcatattccatgaccccagtccccaaacatcagagcanataagtaagggaatataatagttgggtaaactataggatttgcttcttggtatcttgcaacactgccaagtaaaagggctaattangaatctaatcagttgtcatggatttattatataccgagaagaaatggatagtaagctagataatttgtatccaccctgganaaacaatgcactataaagcagtcctaaaatttacttcaagacatttaataattcatgttgctgctagtaaagtaactaaacactgtatgcatcaccaatttcttgataaggaattgtgaaagtgttggtcctaanatatgt

SEQ ID NO: 18575 - DNA, 422 bp, Glycine max
  unsure at all n locations
agtcttttattattcttggcccgcggntccttggccctcttgcaattatgagaatatggagcttctgtttgttctatgtcatggctgaattgtgggggagtgtggtgatttcggtgctgttttgggggtttgccaatcaggttgtttcattgtttgaactttgagcttactttgttagttggtaatttgtttctggctttaattntgttatagtatttgttggtgtcgttatcatcttaacattntttaattttggtatctgaacatggcttattgatttcatcatcatgaatggctgttgtttgntggattgtgtcacttttcagctattcgttntggtcatattcatttgtatgctgctcctttctctatagcttagccgcttagcttttgatgagtcccttatatgttattatttcttg

SEQ ID NO: 18576 - DNA, 404 bp, Glycine max
  unsure at all n locations
tattacaagtcagtgagacaacctcaaagaaggctgaatctaataatgaaagaagaagtaagataggaagtgctcaagttggtagaggcagggctcatttacctaatctcggatagttcatgggttagtcttgttcaagttgttccaaanaagggaggtatgacagtgataaagaatgatagagatgagttaattcctacaagaatagttactgngtggaggatgcgtattgattacaggaagctaaatgaagccactanganagaccattacctgctccccttcatggaccanatgcttgagagacttgcanggcaatctttctactgtttcttagatggatactcanngctacatcaaattgcagtggatcctcangaccaagaanaaacatctttcacatg

SEQ ID NO: 18577 - DNA, 434 bp, Glycine max
agcttggctattactttatacatgcaaccaatgagagaaatatgtctatagtcatttaaagactgtggatgggttgctttacgaataagagccaagaaggaggcattgctgcctctagggaagctgccatgaatatggaattcatccacaaatctcctgaattcaggtttcaaaaccccccaaaattccttattaaaattgaaattaaagccatctggccctgagcatttgtctccaccacaactccaaacaacatctttaagctcttggtctgaagaaggggcaattttaccctccctctgcctctgatcaatcatagggaaatataccccatccagagaaggtctgaacaatgtatcttcagtaaatctatggagagagaatttgagaacttcattcttgactaaattatgctggtgaacccatacaccatc

SEQ ID NO: 18578 - DNA, 401 bp, Glycine max
agcttaaacattcaacttcgagcgtctcgatatattacgggactcaatcagacatccgagtaaaaaattattgtggtttgaattggctcatagattcaactttcaatttcgagcgtatcgatatattacgggactcaatcagacatccgagtaaaaagttattgtcgtttgaactagttcagagattcaacattcaatttcgagcatctcgttatattacgggactcactcagacatccgagtaaaaagttattgtcgtgtgaattggaaaagaggttcaacattcaatttcgagcgtctcgatatattacgggactcaatcagacatccgagtaaaaagttattgtcgtttgaattggctcagagattcaacattcaatttcgagcgtatcgatatatta

SEQ ID NO: 18579 - DNA, 334 bp, Glycine max
  unsure at all n locations
ntgagccaactcanacgataataactntntactcggatgtctgattgagtcccgtaacatatcgagacgctcgaaattgaatgttgaacctctgagccaattcaaacgacaataacttttttcacggatgtctgattgagtcccgtaacatattgagacgctcgaaattgaatgttgaacctctgagcaaattcagatgacaataactttttactcggatgtctgattgagtcccgtaacatatcgagacgctcgaaattgaatgttgaaactctcagccaatacaaacgaccagtaacttttactcggatgtctgattgagtcccgtacatat

SEQ ID NO: 18580 - DNA, 426 bp, Glycine max
  unsure at all n locations
tcttatccaaggctcatcttggtggtgaagctccttcttttatgacttattccctagtggatggcacctcctctcacctcttctcctttgtcttccgctgcatctccatggtggaaaatcaccattaaaggacctcattgaagctcaaagatccagcctccatagaagccccacaagcaagcttccatcactgcctttgaggatcgaggatagacgaacaaagcacctaagaaggaaggaggttccattggtcaaggtgacctgnggaggtacatcaggagaagatgccacgtgggaattagagagtcagatgcaagccgcctatccatccttgtttgagtcaggtaaatttcggggacgaaatttctaaaagggtaggagagttgtaacaccctgagatattataagttatatatcgatgtttaa

SEQ ID NO: 18581 - DNA, 368 bp, Glycine max
tatgcacttctcttatgacaacggcagcactcctagcactaaactgctacgagcttgaagccatcttctcaactaaatttctggcttcagcaggggccatgtctccaagggctccaccactagcagcatcgatcatacttctctccatgttactgagaccttcataaaaatattggagaagaagctgctcagaaatctggtagtgagggcaactggcacacaatatcttgaatcttacccaatactcatacatgctttctccaccaagatgcctgatgcctgaaatgactattctgatggcagcggtcctggaagcagggaaaagtttttctaagaatactctcttgaggtcatcccagctcgtgatg

SEQ ID NO: 18582 - DNA, 423 bp, Glycine max
  unsure at all n locations
tacccatattgatgagttattnttttaagtctacattctttaactgtttgtcaaaanttgatgcaatgtggcgaatgcaatacacataagatacatccggtccaatccacccaactcgttttgattgcaaagctgctagtaaagtggttcacctgtctaatataatacataaatttggttaaagtgtaacatatctcctcaaataatgcaagaaccacatccaaacttctttgatctcgctctcaacaattgcaaaagaaagtggaaaattatttctactaccatcttgtctaatggcagtcaacaaagtaccataatattttccagttaaaaatgtcccatctgcttgctcaattggcttgcaatattgaaagccttcaatgcatagcttanaagcccaaaatacacgattaagaatcacct

SEQ ID NO: 18583 - DNA, 420 bp, Glycine max
tgtagggttaaagtctcacgattggcacgtgctgatgctcatttgttagccgaggctatacgagacatcttgccaaacaaagtcaggttagcgataactcgcctgtgctttttcttccatgctatatgtagcaaagtcattgattcagtcaagtttgatgagttggaaaatgaggccacaattatactgtgccagttggagatgtattttccccctgctttctttgacatcatgattcacttgattatgcatctggtcagagaaatcaaatgttgtggtcctgtttatctacgatggatgtacccggttgagcaatacatgaagatcttaaaagggtatacaaagaatctatatcgtctagaagcatcatggcagaacaagctagacatgtattttacgtgcaagacccttgtgatgaaa

SEQ ID NO: 18584 - DNA, 406 bp, Glycine max
  unsure at all n locations
gggatgtgaacgagatatcgcgggatatatacttgtgattgccaaacaataacgacatccatcgtctactacgaattagagagacatatgggctgacaggtatgtttgattctatcgattgcatgcatcggaaatcgataaatcgtctagctgcattacaaggtcaatattggacaagtgatcattgcatacccataataatacttgaatgcgtgccgtatcacgacttgtgcatttgacatgcattattatggagtggtggattcaacatgatgacattaatgcgtcaaaccacatcatttgtgtttaatgacattntggaaggttgagctctctactgcaatatacaatgaatcgaaccccatataatatgagatactatattgtagatgacgtttatcctgat

SEQ ID NO: 18585 - DNA, 403 bp, Glycine max
tctaaactttatacaagaatgaagctctgataccacttgttagacttttggcctcagatatcttaagaagggggggttgaattaagatattccaaactacttccccaattaaaatctatttcactctcttttcaagttataaattcccttaacaatgaacttcttaaatattaattcaaataagacaatttgaatatgaatatcaagcaataataaacaaaggagataaagggaaaagaaagtccaaactcaaattattactggttcggcccaccttggggcttcgtccagtccccaaccaacccgttggaaagtcccactatctggtaaattccttttacaagtcttaaccacataaggacaatccttccttggggttaaaaattccttaacaccagaaaac

SEQ ID NO: 18586 - DNA, 421 bp, Glycine max
  unsure at all n locations
tgagatctcccttgacaattgaatggaagagatgacatgtattntattctatgggtntaataccttcctagcacagtgtccaagtttttctcctgttgctggttggtgatcctcattctcactctcactctcagctaaaaggcgcctagcagtgccagaaatatcagagaaagagaaaaaagtctgaaaatgtgatgtggcttttgttaattcttcctttccattatcctttagactgcaaggaagcatatggtgagtccaacccactggaacacaaattctgattatcccattttgtgttattgtcagtagcagagaaataaagcccaatagcatcaactctgaaacgaagacagaaaacagaaaaggaaaaaaatattgcgaaattaatcacatcccaattntcataacagaagtccct

SEQ ID NO: 18587 - DNA, 422 bp, Glycine max
tttgtaagggatgtgaacgagatattgtgggatatatatttgggaaggccaaacaataacgacatcaatcgtctactacaaattagagagacatatgggttgacaggtatgtttgattctattgattgcatgcatcggaaattgaaaaattgtctagttgcattacaaggtcaatattgtagaagtgatcattgcaaacccatagtaatacttgaaggcgtcccgtaacaagacttgtggatttgacatgcattattatggagttgtggattcaaatgatgacattaatgtgttaaaccaatcatttgtgtttaatgacattttggaaggttgagctctctagtgcaatttacaattaatgtaaccccatataatatgagatactatattgtagatgacgtttatcctgatttggatacttt

SEQ ID NO: 18588 - DNA, 436 bp, Glycine max
  unsure at all n locations
tcaagaaaaagatggcctcagcaaattccttatttccagattggaattctatcaatagacctccaatctttaatggagagggttaccactactggaaaacccgaatgcaaatttttatcgaggcaatagatttaaatatctgggaagccattgaaatagggccttatatacccaccacagtagaaagagtttcaatagatggtagttcatcaagtgaaagcataaccatagaaaaatctagagatagatggtctgaagaggatagaaaacgagtacaatacaacctaaaagccaaaaacataataacatctgccctaggaatggatgaatatttcagagtttcaaattgcaagagtgctaaggaaatgtgggacactcttcgattaacacatgaaggaactacagatgttaaaagatctangataaatgcactaac

SEQ ID NO: 18589 - DNA, 347 bp, Glycine max
accaagaaaaaaccacttttacatgcccctttggtgtctttgcttacaaaaggatatcgtttgggttatgtaatgtccctgccacctttcagagatgtatgctagccattttgttgatctggtaaaaaaatgcatcgatgtgttcatggattatttctttgtctttggattttcctttgaccattgtttatccaacttggaattggtgtgaccacaagatctcgtctcgagggattgaagtggacaaggcaaaaattgatattattgagaagttgcctccacttatgaatgtgaaaggcatccaaagttatctcatacatgcccgacttctatcggaggttcataaa

SEQ ID NO: 18590 - DNA, 433 bp, Glycine max
tgaagaaactgtctacatgcagcagcccccaggtttcgtttatgacagtaaccttgtttgtaaactgaacaaggctctctatgggctgaagcaagcaccttgtgcatggtttgaaaagctttcagcaactctcatctctcttgggttcaaggctagcaagtgtgacccttccttatttgtatgtcatgtggaaacacaacttatgcgcttgtctatgtggatgacataatccgcactagaaataatagtgttctaattcagcaacttatttcatagctaaactctattttctctcttaaacatcttggcaagttggactacttccttgggattgaagtcaactataattccgcaggttctgtcatgctttctcaaaccaaatacatctcagatttgcttgaaagagtaaatatggaaaaagctaaaggaattt

SEQ ID NO: 18591 - DNA, 409 bp, Glycine max
tcaacattcaatttcgagcgtctcgatatattacgagactcaatcttacatcagagaaaaacgttattgtcgtttgaatttgctcagagcttcaacattcaatttcgagcatctcgatatgttacgggactcaatcagacatccgagaaaaaagttattgtcgtttgaattagctcagaagttcaacattcaatttcgagcgtctcgatatgttacgggactcaatcatacattcgagaaaaaagttattgtcgtttgaatttgctcagaggttcaacattcaatttcgagcgtctcgatatgttacggggactaatcagacatccgagtaaaaagttattgtcgttggaatttgctcaaagattcaacattcaatttcgagcgtctcgatatgttacgggactccatc

SEQ ID NO: 18592 - DNA, 389 bp, Glycine max
tgtaatcgattacacacatacttgaatcgattaccagattattttttcagaaaacattctcaacagtcacatctttttgtgtggttcttgaatggctatcataggcctatatatatgtgacttgagacacgaatttgacaagagtttttcagagcaaaaaggtcttatactcttataaagagaaatcgttttatcctcttacaaattccttggccaaattacttgtgattcaataaggaattatttgagcgctcaaattgatcaatctatctctttcaagagagatttcttcttttcttcttcttcattttgaaaagggattaagagaccgagggtctcttgttgtgaaataattctaaacacacaggaatgcgtgtccttgtgtgttt

SEQ ID NO: 18593 - DNA, 367 bp, Glycine max
tgatcaacacttgcacagtggtcgatgatgcatgggagatcctgaaaatcactcatgacggatcctcccaagttgaagatgtccagattgcaactgttggctacttaactcgggattctgatgatgatcgaggaagaatgtattcatgacttccacatgaacattcttgaaattgccaatgcttgcactgtcttgggagagaagatgacagatgaatagctggtgagaaagatcctcatatccttgcctaatagatttgacatgacagtcactacactagaggatgcccacgacatttgccacatgagagtagatgaactcattgattctcttcagacctttgagctaggactctcggatagggctg

SEQ ID NO: 18594 - DNA, 365 bp, Glycine max
  unsure at all n locations
tcttacgtagcctctcttggtgctcagaatatcccaataacntatccctcttattactagctattgtgaattctttagttcctgaatgtacaaccttaaaattgttgctcgttcccctctttgctaaaacatcaagagctgtaactacgtcactaatcaaaggtctggtatcagcttccttctgaatacacattgctgcaactgctatggcttggtgtagaccctatgttgggtagttccctttcatcaatggatcagccattgatgaaaatttccttctgtctctgaatacgggttgtgccttataaaaaaaaacattatgaatgtcaattgctgaacatttgtgcatattattggtcttagct

SEQ ID NO: 18595 - DNA, 427 bp, Glycine max
  unsure at all n locations
agaatcggacctcagtgtgaaaagttatgaccatcnctttttctcgagagcgttcgttgatcaatgtcgagcatctcgacatgttatgcgctcaaatcggacatccgtgtgaagaggtatgaccatttgagtttctcgagagcttccatggatcaatttcgagcatatggtcctattatgtgcccgaatctgaccttcgtgtgagaagttatgaccatttgaatttctcaagagcttgcgctgtttaatttcgagcgtctcaatatattgtaagcgtgaatcggagctcagtgtgaaaagttatgaccattagaatttctccaaagcttacttggttcaatttcgagcatctagacatattatgtgcacgaatctgtccttcgagtgacaagttatgaccatttgaatttatcgagagcttacgctg

SEQ ID NO: 18596 - DNA, 399 bp, Glycine max
  unsure at all n locations
tcaagcttcatgagagagtcatatatcaaatngagaggtttaattttagctatgctaaactagccaacaaagggagaaagaaggcagacttcgaaccccgatattgggtttgggtgcacatgacaaatgaaaggtttccggaacaaaggaaatcaaagcttctaccatggggagatggaccatttcaagtgcttgaaagaattaatgacaatgcttacaaagttgagctgcccggtgagtataatgttagttccaccttcaatgtctctgatttatctctttttgatgcagatggagaatccgatttgaggacatatccttctcaagatggagagaatgatgaggacatgaccaagagccatggcaaggatccacttgaaggacttggaggacctatga

SEQ ID NO: 18597 - DNA, 425 bp, Glycine max
  unsure at all n locations
tcttcttgtttctctccccatttgaaaccaacatttttcttgagcacttcattgagaggtgctgccaatgtgctaaaatccttcacaaatcgtctataaaaacttgctaagccatgtgtcgcaacctacccttcggcgggagggcgatgcgtgactcgcgggatgcgtgttccacgaaaggaatacgcgcggagtcgccactaatgtttatttgaggaaaacgtcggaaaaaccggaaaagaagcgatctacgaacttttaagtgaaaggctcgggagttgtatttacgcgtggggaaggtattagcaccccacacgtccgtcacaagggacggcagcctttaatcgaatgtgcaaacatgactttgatttttacgttcccttttatgtccttatatcctttataccctntntatanttttttct

SEQ ID NO: 18598 - DNA, 406 bp, Glycine max
  unsure at all n locations
actcagctgtcattggcgagcaaataaaatntttttcatgatagcatggatagtattaagaaagttgcaattgattcagacagatgttgtagggcctcaaagaacaccttcattgaaaggcaatttgtattacactatatttattgatgactttttctttaagttcaaatcaaaggtggctgaaattttttggatgttcaaagtcaagtagagaatgaaagtggtctcaaaattcaaattttgaggtctgacaatggcatcaagtacacatctgcaaaatttaatcaattttgggaggattctgacatccaacatcaacttactaatccttataccccacaacaagatggggttagtgagaggagaaataaatatatcttggagatgatgagatgcatgttgtatg

SEQ ID NO: 18599 - DNA, 312 bp, Glycine max
ttttatttcaaaagattctcatgaaacttgtgacattggtcatttagcttaacacaaacgaaagccctattctcttaattcgagaagaagccctaaaatttttgagttgatgcctatggatatttggggaccattttttaaatcatcaattcgtggacatagatatattgtaactatacttgatgatgatagtacatatactcgggcggctttattaaaatcaaaaagtgaagtgaaaacacatgttcaaaactttattaatctgatcgaaaatcaatccgaagcaaaaattaaatgcattcgattcgataa

SEQ ID NO: 18600 - DNA, 429 bp, Glycine max
actcagcttctaattttgggattgatgctcttaaactgttggtatatattaaactgagttccaaccaaggctgtctcaaagacaccttttgagttattcaagggttggaaaccaagtttgcgacatatacgcgtatagggatgcccgtctgaagtaagaatttataatccacaagagaagaaactagaccctaggactattactgggtatttcattggatatcctaaaaggtttaaagggtataggttctattgtccatcccacaacactaggattgtggaatcaaggaatgcaaagtttcatgaaaatgacttgatcagtgggagtgatcaatttcagaacatttcttctgaaagggatcactatgaagctgaaccttctgggacaagtaataggttggtagtcattctcacccctcaagttaaaatg

SEQ ID NO: 18601 - DNA, 437 bp, Glycine max
  unsure at all n locations
gacctataaaactcagctgtatcatacacacatctgaatcgatatcgtttagtttttcaganaacattctcaacagtcacatctttttgtgtggttcttgaatggctatcataggcctatatatatgtgacttgagacacgaatttgacaagagtttttcagagcaaaaaggtcttatcctcttataaagagaaatcgttttatcctcttacaaattccttggccaaattacttgtgattcaataaggaattatttgagtgctcaaattgttcaatctatctctttcaagagagatttcttcttttcttcttcttcattttgaaaagggattaagagaccgagggtctcttgttgtgaaataattctaaacacaaaggaagggttgtccttgtgtgtttagaacttggaaaaggaatgtataagatagtggaactct

SEQ ID NO: 18602 - DNA, 427 bp, Glycine max
  unsure at all n locations
ttccattctcttggaagttcatcattggatttttcttcttctggaggatctttattgtttcctttatcatttcctttggaatcttgttcatgaatattcatatgttctaaagaatctgcaatatcatctagcatattctttcttgacaagatagcattagattcatcaaaggtaacatgaatggattcctcgatattcatagttcttttattatatatcctatatgctttgctttgtaatgaatatccaagaaaaataccttcatcatattttgcatcgaattttcctagattatctctaccattattaagcacaaagcatttgcaaccaaaaacatgtagatgagaaatattaggttttctaccattaaataactcatatggggttntctttaanataagtcttattaaggccctattcatgatct

SEQ ID NO: 18603 - DNA, 402 bp, Glycine max
  unsure at all n locations
aactcaagcttgtaggctacatttacaaccatacattggctnngatcactatgaggaaattctcacaaaaaattgaattagtgagacatggagttacaagatttgctaccactttcttaactttgcaaagattgcataagcaaaaggccaatcttataaggatgtttacttcagatgaatggttgaagtctaaggcagctaaagagcccaaggggaagcaagcaacagatgttgctcttatgccatcattttggaatgatgttgtctatgctttaaaggctatagggcctcttgtaagtgtgttgaggttggtggataatgaacaaaaacctgcaatgggtttcatttatgaagcaatggatagggccaaagaagcaattcatagagctgtcaataacaatg

SEQ ID NO: 18604 - DNA, 417 bp, Glycine max
ttacgatttcaaactccacaaataagagatgctttattataattaggtgaatttaatgatggtcttaaaataaaaagcgaagcggattgtttagcaacttatgaacttgaaaattttgagtttttattaagtatgactatttggtatgacatattatttgctgtaaactccattagtaaaaagttacaatcaaaagatatgagtatggatgccactatagaacaattaaaaggtcttattttattttatttttgaaaaatatagagaaggtgaatttgaaaatactataatttatgccatagaaattgttaatgaaatggagatagaacctaagtttcatgaaaaaacatgtagtttgtagaaaaaaaacaatatgatagaaatattgataatgaagttgaaaatcgcctaaagaat

SEQ ID NO: 18605 - DNA, 425 bp, Glycine max
  unsure at all n locations
gcacgtatcggtcaagtgtatggaccacgttgtattcatttgctcatcgataatggttccagtttaaacgtgatgcccaagagcactttggagaaattaccattcaatgcttcccacctaaagccaagttccatggtggttcgtgccttcgaaggcacccggcgagaggttaagggagagatcgacctccctgtacagatagaccctcacacctgtcaagttaccttccaaataatggatattaaccccccttacagctgcctgttggggcgcccgtggatccactcggtgggagttgttccctctacactccaccaaaagttgaaattcgtagtggaagggcatctggtcatcgtatcangcgaggaagacatcttggtaagctgcccatcctctatgccttatgtggaggccgcagaggagtc

SEQ ID NO: 18606 - DNA, 425 bp, Glycine max
  unsure at all n locations
cggctgattaaaaaacacataactaggagtggaaatatattaaaagttcgattatatttgttgttgacaaatagagaatagaggatagtacacactaatattacaataataggaaaatggaataattcatgtaccaaataaatgataactcatatttgatgtgaaaaatatgttacccaaactgtcgagcttgtaaatcaacatatgatattttaacttaatcaagtgaatttaagtttaatataattgtgttaaatattttgataaagaattttgatagttataatagttataatgtgatttttatataaaaataataaaaatcattagtcaatctgggtaaagaaagaagacaagacatagaggttacaagtttaaattctccaaaacgaatatttcanacaaaacttataataaattaacat

SEQ ID NO: 18607 - DNA, 385 bp, Glycine max
acatgaaaattgaggaaccaaaccaaatctatatgggagaggcgtgagagctaacgaagtttctctgctacactttgagatggaaattcaattgcagcatccgaagaagcacttgagagcgagcacatcacaaggaggccaagggagaagcaacaaccacatgtcccaaagcaagtatgttggggtgaggcaaagagcatcagggaaatgggttgctgagatcaaagacacaacacaaaagataagaatgtggcttggcacatatgagacagcagaggaagcagcaagggcttatgatgaagctgcatgcctccttcgtggatccaacactcgcaccaacttcatcacacgtgtgttccttgattcccctctcgcttcgcggatt

SEQ ID NO: 18608 - DNA, 353 bp, Glycine max
aattgaggaacccaaccaaatctatatgtgtgagttgcgagaactaagggaggttctctgctacactttgagatggaaattcaattcccgcattcaaagaaacacttgggagccagcacatcaaaaggaaggtaagggagaaacaacaaccaccaaaccaaaagccagtatgttggggtgaggcaaaaaacatcagggaaatgggttgctgagatcaaagacacaacacaaaagataagaatgtggcttggcacatatgagacagcagaggaagcagccagggcttatgatgaaactgcatgcctccttcgtggatccaacactcgcaccaacttcatcacacgtgtgtccct

SEQ ID NO: 18609 - DNA, 426 bp, Glycine max
aggaatttggacaaagacgctagtatcatcgttcttttgtcaaggttagcttatgaacttctccaacgttgataggacagtgcatttctagtatcatcgtacaattgtcaaggttagcttcaattccccggtgggtgatcatgaaacccaagaattttctgcctctaaccccaaaggtgcatttttcaagattgaggcgcatgttatacttgagaatctctttgaacacctctgccaaatttgccacatgtttggccatgctatgagacttgacgaccatgtcattcacatagacctcgacattttgtcatatctgttgtttgaagacccagtccataagcctttgttatatggctcctacattctggaagtcgggcgcaccatccataagcttttcgatgatgggaaagggatatgcatccttgg

SEQ ID NO: 18610 - DNA, 415 bp, Glycine max
  unsure at all n locations
ntgagctcaatagctccaacctcatctataccccatatttagaatggccaaggtgctaccaagacgttcaaaggtacggccggagcattgacattatcggtgaaggcctggcacttgtggcacttcctcacatggatgcaacaatagttttccatagtgagccagtaataccctaccctcagaatcttctaggccatggcatgcccgttggcatgtgttccaaaggatccctcatgcacttctactagcatttgcttagcctccttggcatttacacattgaagcaaaaccatatcatggttcatcttgtacaagatatttccacttaggaaaaagcaggctgcacaaacattactcagctcagcaagaacaatttcttataatattcaaccaatttagaatcaagaactcaaca

SEQ ID NO: 18611 - DNA, 273 bp, Glycine max
taacttgcgtattgctgtgacttacagtcttcaccgggctcaccttatgtgtcctactgactgtgaagtcaccctcactggctgacagacccgcagggtcagccatacagagatttgacgaacgccaccatgcttgctctacaatctcgctaagacgatccatctatgatggccggtctgttcactgcgactgactattccgccatgacgctgagattttatctctgtacagctctctctggaactgccagagtgacctctgagacccactga

SEQ ID NO: 18612 - DNA, 355 bp, Glycine max
cttgattttctcacggtgcacttggaccccatctctaccaactacaaaccctatgaaaactatattatctacacaaaaagtacacttctctatattatcatagcgggtgtatttcctaacgactaaaataacttgcctgagatgtcctaagtgatcatctatgctccaactgtacactaaaatatcatcaaaataaacaactacgaatctacctacgaaatcccttaagacatgatgcataagcctcatataggtgcttagtgcattagtgagcacaaaaggcatcactagccattcatacaaaccaaacttggtcttgaaagcggggttccactcatcacccgttatcatactg

SEQ ID NO: 18613 - DNA, 278 bp, Glycine max
agacgctcgttattgagctacggctgctctcgagaggatcgaatggtcattagttgtggaacgaatgtgctatgaggggacgtgactcgtctatacgctcgaaattgagcgacggatgctctctagaggtgcgaatggtcataggtatcaacacggatgtccgatacgtggacgtagtagatcgggacgctcgaaatggaacagcggaagctctggagactatggaatggtaataacattccactatgatgttcgacttgggaacgtaatatatctag

SEQ ID NO: 18614 - DNA, 363 bp, Glycine max
  unsure at all n locations
cgagaaggaggaaaggtgattggagatgccacttcaaggagaagatgagtcgagaacaaactcaccaccatatgaagccatggataagagcttgaaagtaggagaagatgagtggagggagagggagagaagagggcacgaaatttatgcctcaaattaggtcaaaacattaaagtctaatttcttaaatgatcaaacttgaaaaaatgcacacacaaggcctctatttatagcctaagtgtcacacaaaattggaggcaaatttgaatttctattcaaatttcacttgaattagaatttgaatttgtggatccaaatttggagccaaaattntactaactatgagtaatgaatttcagctat

SEQ ID NO: 18615 - DNA, 317 bp, Glycine max
tgaattcaaaaaaaaaacaaaaattacaattacaattttttaaaaatattgtaatattttattttagcttgtgctcacgtactcccacgtagcccatatcctcacttgtctcagcaccgggtacccatcaatcctaccaagcttccgctttcaatgagctcttttttaaggttgagagaagaattgatttggtctatggaggtggtagcgtgggtttgatgggtctagtttctcaggcggttcatgatggtgggcgccatgttctggggtttgacctctctctctctctctgtatctgtctctctatcctaatctca

SEQ ID NO: 18616 - DNA, 314 bp, Glycine max
tgacctttctagctacaggtacaatcccacgtggacgaatcatcccaaccttacatggttgagtcttccacaatagcagcaacaacaacagtcgctactgcaatagccctataaatagcatatagctgaggcttcctccgcaccttcccttgaagaacttgtgaggaaaatgactatgcaatacatgcagcttcaacaagagaccaaagcctccattcatagcttaactaatcaaatgggacaattgcctacacagttaaatcaacaacattcctacaatcctgactgactaccttctccatctgtccagaatc

SEQ ID NO: 18617 - DNA, 310 bp, Glycine max
atgacgctctccagcaacaggtacaatgccggatggaggaatcatcccaaccttagatggtcgaatccttcacaacagcaacagcaacaacgaccttatttacaaaatgttgctggcttaagcagaccatactttcctccaccaatccaacagcaacaacaacaacagcaatagccccataaacaacagacagttgaggccactatgcaaccttccattgaagaacttgtgaggcgaatgactatgccaaacatgtagcttcaactagagaccagagcctccatatatagcttaactaattagatgggac

SEQ ID NO: 18618 - DNA, 360 bp, Glycine max
ttcatgaaaatacaaaaaaaagtccctactacaaagactacccaaaatgccctcaaatacaaggctaaaaccctatactacaagaatggccaaaatacaaggcccaaaagaaggaaaaacctattctaatatttacatagataagcgggctcatacttagcccatgggcccaaaatctaccctaatgctcatgagaaccctacggccttcccttggatctctggcccaatatactcggagtcttctatccaattccctaacgaggtaggattacatcactatgcatgcatcaactttgaataacacccacacggaaatgctcctgcgttactcaaatttctcaatttcagacacgttgat

SEQ ID NO: 18619 - DNA, 302 bp, Glycine max
agcttttatcatgggttatggaccatttcaagtgcttgaaagaatcaatgacaatgcttacaaagttgagctgcccggtgagtataatgttagctccaccttcaatgtctctgatttatctctttttgatgcaaatggagaatccgattgatgacaaatccttctcaagagggagagaatgatgaggacatgaccaagagcaatggcaaggatccacttgaatgacttggaggacctattgatgatgacatgaccaagagcaagggcaaggatccactggaaggacttggaggacctatgac

SEQ ID NO: 18620 - DNA, 388 bp, Glycine max
tttcttgtttctacacgtatgtatcagctccaatagatctttcgctctccatgctctgcttgttgagaaagaaaatcggtgttgcttaccaaggagacatcctttacacacttcattgttctcctttatgcttggaagatctctcatcatgttcttctcatgtaacaacttcaaggcatgtgtgttgaagtggccaaatcttcgatgccatagccatgaatcatcaacttgtaccttcatgccaatggttggtgcatatttaaatttagagggaagcttctattgctcttattcatctttacttgggctatctcagacctttctatttgttgcctaagatttgcatacacctcctttaaagtgaagcgtgtcgcctctctcaatcatt

SEQ ID NO: 18621 - DNA, 293 bp, Glycine max
ttcttttcacccttaccgacaatggaaaaagcttttaatggaagtcaagagcatgaaagtgcactgataccattaactagtcaatatgttcttgagcaggttgaagacatctatactatatttggaaagacccataagaaggataaaaagactaaaacttgcatatggaagatgaggccgatattgatcgatcttgcatattggttcgatctagacgtcagacattgtatcaatgttatacatgtggagacaaatgtgtgtggtagtgttattgccacactccttaacattca

SEQ ID NO: 18622 - DNA, 436 bp, Glycine max
  unsure at all n locations
tactaagcttgatccacatggcaccgtcttcctgatcgccctaattttcttccaccaacaagattattagtagcaaccaacatgacattcttttcagcttctatggccccaaatggcgcctccttcggcgtaacctcacttcaagaatccttcacccctcacaagttaagtcctattcacatgctcctgcaacgccttagatggttatttggttgctacttatgcctctgtgaatttcctggtagctgagatcgggagggacccaacagcttgggatgatcctttggcctttaagccagagaggttcatgaacaatggtgaacaaaatggaggcacaaattttgacataatgggaagtaaagagatcaagatgatgccgtttggggcagggaggagaatgtgtcctggctatgctttgngaaatttgcacttagag

SEQ ID NO: 18623 - DNA, 407 bp, Glycine max
agcttgataaaattttaagaaaataagtactagctcaaatggttaatagtttctataattttgaaaagtataatgtacattaacattagtgacaaaatagtaaatggagtagttatacccgatccaagaaatatttagcaacattgggaagattatgtaattccttttttgtcttgtatgtttcttgaacagcaggatctttccagatttcatctaccataggagcatactcacgcgttgcagcagggaagaaggcctccaaatctccgatggccataatatccagtaatcagtcagaaaagtgcttgaatctttgattatagagtaaacactcaccttgttttcgtcagctgctgtctctgctaaatttattatacaattagattcattcacataactctagcctt

SEQ ID NO: 18624 - DNA, 424 bp, Glycine max
  unsure at all n locations
tctaaactntgtacaagaatgaagctctgataccacttgttagattagttgcctcagatatcttaagaagggggttgaattaagatatcacaaactattccctaattaaaaattctaatttgattttaacccaaatcctaagattccttttaaaatgaattcctaaataattattcaaattaaacttactgaatagaagcaataagcaataataaataaaagagtttaagggaagagaaagtgcaaactcagttttatactagttcggccacacccttgtgcatacgtccagtccccatgcaacccgcttgagagttccactcaatcgcaaaaaccctttacaagttctgaaccacacaaggacaacccttcctttgtgttcagatttctttacaacaagagaccctcggtctcttaatccctt

SEQ ID NO: 18625 - DNA, 408 bp, Glycine max
  unsure at all n locations
gctgtgaataatagtcatgttcataaagaagagaaaaaggtttttatttatacatgtatgtaaaaggaaatgtgtatagaagaattcttgcgtgtaaatgatgtgtggaaaggaattcttgtgtgtgtgagcaacgagtgtatatgaagaaacttttgtgtgaactataagtgtgtgttgaaaaaaatgaaaaatctttgaatgtgaatagggtttgtatatagactatatgacgtaaagagaagagttccaatgcgtgtacagaaaaagtttgtcatgtataagaatatagatgtacaaagaaaggttttcctcataaaggaccacaggtgtataattntgtgaatgaaacaaaaaggaaaaagaaagaaagaccgcgaaggtcgacatgttatagttaagaagtat

SEQ ID NO: 18626 - DNA, 421 bp, Glycine max
  unsure at all n locations
tgctccanagaataagtgaactacatcttgtttatttctttttgcaacatccccttttgtaccccaaaggtgaagatggctatagaccaaatattcttcataaggatcatccaaatatctatgttgcaaagaggaaaaaagttatcatgcgtgaatgcaatcaagggacaatgaagctcacacaatgctacattcaagaagattgtttcaacaatggattattaatgaatattgtatgattgagtctcaaaaactaaactatgttagaaaacatcaacaggaactcagagttaacaagtacatgaatttaaatgcatgtaataatgagcccctaacccaaggcaatgaanaaggtaagagaattatactaccaagcttttttgctggtagttagagatatatggaacaactgtatttcgat

SEQ ID NO: 18627 - DNA, 391 bp, Glycine max
tgtcttttcttgtttctctccccatatgaaaccaacattgttcttgagcacttcattgagaggtgctgccaatgtgctaaaatacttcacaaatcgtctataagaacttgctaagccatgaaaactcctcacctcggtcacagacttatgtgtaggccattcttgaatagccctaaccttctcctgatcaacttgcactccttttgaactcacaacaaaaccaagaaacacaacatgtgtagtacaaaagatgcatttttcaagattggcatacaatcgttcttttctaagcacagtcaagacagattttaaatgatcaatttgcaaatcaagcgaagtgctatagataagactatcatcaaagtacaccacaacatactttcctatgaac

SEQ ID NO: 18628 - DNA, 412 bp, Glycine max
agtgtcatagtcatagcattattgttagtatttcttatagcccataatggttcggataatgtttcatgccaacacctgtgtttcttttcaacaaattttttgatttaatttacaataatcttgttagtggcttctgcttgtttgttagcttaggcatagaaaggcataaaataaatgatttcatgccaaactattgagcgaatgccactaccttgtcacatgtgaaaatagtaccctggtcatccattatagcctctggtatcccaaatctataggctatttggttttggatgaatttgatgatgtcattttgagtaacagagaccatcagttgtgcctccacccacttcgtgaagtaatgtgttgccacaataatataactatggcatttagaagaactagggtggatttt

SEQ ID NO: 18629 - DNA, 399 bp, Glycine max
agcttatgaatttaaattggatatgttatgaatatatatgaaaatatcgttcttttgcagatacattcaagttaaaggtcaagccagggaagacataccttatgcgtttgatcaatgctgcactcaatgacgaactcttcttcagcattgcaaatcacaccctcacagcggttgatgtcgatgcaatttatgctaagccatgtgacactgacactattctcattgcccctggacaaacctgcaatgttcttctcaaaaccaaatctcactatcctaatgccacattcttcatgagtgctataccatatgcgactggacaaggtacttttgacaactcaactgtggctgctatccttgaatatgaagttccaccacattgtgttcactcaacaacttcag

SEQ ID NO: 18630 - DNA, 427 bp, Glycine max
  unsure at all n locations
ggttaaagaaaaataaaaaaagtaaccaaatattgaccnnataggttattcagagagcaatcaagaacatcttatgataccttgtggactttgtataattggtaataatttgacctatgctactatttacaatggtagctggagccatgaacatttgggcaatttcaaaaacttgctcactttctattatagtaccaatgcctccaattgctttcacaacagcttcactgccccaagtacttaatctacagtatacaagttgtcctttcaccttttttggctctaaggagtcttcatagcataatctgtcaatgcattgaaatggtactttgttaatatggaaagcttaactaggtgttgtcaaataaacaaaaagaaaattacttagcattntccttgcttccaaattgtataatcattccttatc

SEQ ID NO: 18631 - DNA, 439 bp, Glycine max
ctcgtacccgggatactctaactcacctgccgcacgctttcttttacttattgtgaaggaattgagtaccttgagaccttctctcctgatgagaaaattgagacaattccagctattcttgcttaagactgcatcaattgctggaaacttcagctacttgatgttaacaatgcattccttcatggaatcgcatctgaggaagtctacatggtccctcccgctggcgtcaatgagtcacatccatctcaatgttgcaaactccttaagtctttgtatggcctcatacaagccaatcgagcatggtatgaaaaatatcccctttttctcttgtcttgtggatatcatccagctcatgccgatcatagcctgttcatcaaaactaatcagtccaactctatagactttatatatttattgttggcggcattgtgctaactag

SEQ ID NO: 18632 - DNA, 420 bp, Glycine max
  unsure at all n locations
ggancnanggcagggatntcaccagaaantaatgtttgttttttacacncnaaagacagccngccgcactcaccacggncactacgagcaccgggggangccatncgggctctgcaacgcaccgtcaatgtttcaagctgccatgaacaaccttctcagccctttcctgcggaagttcgcgacagtttttttttacgacattctgatctacagcgaaatcttcagtgatcaccttcatcatctcgaatgcgttttcaactctcttctgcaggctcattattatttgaagcaatcaaagtgcttcattggctaacgccagcttgattacttaggccacgttgtctccggcagcggtgtcagacctgatccaacaaatattcaggctatcgtcaaatggatcacgcctcgatcttccaagga

SEQ ID NO: 18633 - DNA, 423 bp, Glycine max
  unsure at all n locations
gcttgttagacaagtggccttagaaatcttaagaagtgttgggtgggttgaattaagattntacaaaccattccccaattaaaaattctactttgatcttaatgcaagttccaagttcccttaaagatgaatttctaaatgatgattcaaattaaacaatctgaatgtaaatgttaagaaacaataaataaaggagtttaagggaagagaaagtgcaaacacagtttttatgctggttcggcaaagttcgttgcctacgtctagtccccaagaaacccacttgggagttccactatctcgcanatcctttacactttctgaaacacacaaggaaaaccctttctttgtgttcagatactttataacaagagactttcagtctcttagccctttgattagaaagagaagaagaagaagaagatg

SEQ ID NO: 18634 - DNA, 433 bp, Glycine max
  unsure at all n locations
ctataacanatctaaaacacatagtttgaaaccaaagggagtactattttctcgcctatcttttcctctttttaaaagaacaagaaaaatacagaggaagggaatccctggaggaaaccaggaagaacaaaaaactcagaattgaaagaacatgcaatggtcctcttgattgccccatatttcaagcgtaatatcgtttaactacatcggagttcacgggcgagggcaattcctcgccatccatgtgggtgagtatcaaagcacccccagaaaaggctcttttcaccatgaaaggtccttcataatttggggcccacttgcctcgtttatctttaacagcgtgggacatcttcttcaacacgaggtccccctcgttgaacttgcgcgggcgtaccttcttgccgaatgcgttctttatccttcgttgatacaa

SEQ ID NO: 18635 - DNA, 233 bp, Glycine max
tgctttttgaacgcatactgtggatacaactagatccggacgaacgctccagatgaggagaaaatggaattcatcactgaagacgctaacttttgatacagggtcatgcccttacgcctaaaaaatgtaggcgctacataccagagattgatggaccagattttcaaacaatagatggtacaataagttgaggtctacattgacgacatggtggtcaaatcccatagcatacc

SEQ ID NO: 18636 - DNA, 402 bp, Glycine max
  unsure at all n locations
tttcttctggtatcaattacgagcgtctcgatatactacgggacataatcggacatccgagtaaaaagttattatcgtttgattaggctaagagcttgtgttttgaatttcgagcgtcttgatatattacaggactcaatcagaaatccgatttaaatggtattcattcggacatccgagtaaaaagttattgtcctttgaatttgctacgagcttccggtttcaattacctgcatctcgatatactatgagacacaatcggacattcgagtaaaaagatatcatcgtttgaatntgctcagagccttcgttgtcaatttcgagcgtctcgatatattacgggattcattcagacatccgagtagaaagttattgtcatttgagtttgctcatagcttctat

SEQ ID NO: 18637 - DNA, 413 bp, Glycine max
agcttccatcattactccacctccttttgcaacagattggatagtggaagggccactttgctaaaatccttgataaagcgcctataaaaccctgcatgaccaagaaaagaacaaacctctcgcacgcaagaggggtaaggcaattgtgaaataacagctataccttgttctaccatgaagtgacatttttcaaaattcagcacaaggttagtttcaatacatctactaagaactctatctagactatccaaacatgtatcaaaagaggattcataaacagtaaaatcatccataaacacctgtatgcaactctctaaaaaatcattgaaaatgctaagcatacaccgctggaaggtaccaggggcgttgcattggccaaagggcatcctcctatagacaaaagtgccaaaggg

SEQ ID NO: 18638 - DNA, 424 bp, Glycine max
  unsure at all n locations
tggaaggtagtcatacctcacanaatatatgtatgtgtgtttatgtagttagataccttggatatgcatgtatataacaaacatacctcacaaaatatatatatgtatgtttaggtagcaagataccttggatatgcatgtatatagcaaaaatatctcacaaaacatatatatgtatgtttaggtagcaagataccttggatatgcatgtatatagcaaaaatatctcacaacatatatatatgtatgtttaggtagcaagataccttggacacacatgtatatagcaaaatacctcacaaaaatatacatatgtttaggtagcaaaatacctcatggaaaaagaaaaagagataaaaaagaaaaaaaaataataataagttgtctagctaaaaaaacaacatgcttgtgaaaagagataact

SEQ ID NO: 18639 - DNA, 393 bp, Glycine max
atcttgtagcaccacttcaccctaccttgccttttgagagcggcaacaacatccatcgtggtacctgtcttccatttaacatgctcagtgtaagtaacaaagtaccgcagaccatccctgagaaagttcttaaagactctacgagccaaacaacgaatcccgagtttcgtaatgttctgcatgttgtcgcacaacaccaccttgtgccccttggctcctcccctgcatccctcccatgaccaccgtatcggccgctgtcacctccaccaccaccaccgaagccatcgcctccaccaccaccacggtcaatgcgggtttgcacttcatgggtagtgatgtttggccatcaaggtcttcgccgtgcaaactgctgttcacaactctcgctccctc

SEQ ID NO: 18640 - DNA, 420 bp, Glycine max
  unsure at all n locations
tcaacatcagaccacttccagggtgctggttcttttacttggatttgatggggcctatgcaagttgaaagccttggaggaaagaggtatgcctatgttgttgtggatgatttctccagatttacctgngtaaactttatcagagagaaatcagaaacctttgaagtattcaaagagttgagtctaagacttcaaagagagaaagactgtgtcatcaagagaatcaggagtgaccatggcagagaatttgaaaacagcaggttcactgaattctgcacatctgaaggcatcactcatgagttctctgcagccattacaccacaacagaatgggatagttgagaggaaaaacaggaccttgcaagaggctgctcgggtcatgcttcatgccaaagaacttccctataatctctgggctgaag

SEQ ID NO: 18641 - DNA, 414 bp, Glycine max
  unsure at all n locations
tcaagttgctaggatagcaacgtgancggtccttcagttcgtcctgagatgaaagctccaacaggcttcttttggttgggatgtgtgctctatctcgcaagattgcatggtcactagcagtcatattctcaatcaattccatggcttcttcaggggtcttcaattttatttttccccctgtagaagcatctaaaagttgctaggattgtggccttaacccgtcaatgaaaatatggagctggattggctttgaaaatccatgagtaggcgtctttcttagtaacccacgaaatctttccaaagcctcactcaaggactcgtctagaaattgatgaaaggatgagatgacagctcttccttcagcagtcttggactctgggaagtatntcttcaagaaattttcaaccacttcat

SEQ ID NO: 18642 - DNA, 430 bp, Glycine max
  unsure at all n locations
tgtgacanatctcttgagaaaataaatatgctcaatnntttgttctttttgaatncaanagcaaaccaaatgcaccttctctaactccttgatcataaagatctacttcagaagtgcccccttttggatcaccatgataaacttctctgcccatccaatccgtatcaaacagaaagaagggaaaccatgacaactgcaggtagacaggattgaaatgaacataagaaggatttcaaatgggaagcaccaacactaggctaatagcattcacaacacaaccgacttgaaaacacaaatatcaacagaaacctttgcaaataaatactagtacatacccaagtgagagccattacaaccaggacagaatgcatagcaggtggcaaatgccttaaacttgtcaacaagtttaccaatactgctccaggcccat

SEQ ID NO: 18643 - DNA, 396 bp, Glycine max
agtcttttagaaaaatggccttagcaaacttcttatttccagaaggaaattcaatcaatagacctccaatctttaatggagagggttaccactactggaaaacccgaatgaaaatttttattgaggcaatagacttaaatatttgggaagccatagaaatagggccttatatacccaccacagtagaaagaatcacaatagatgggagcacaacaagtgaaagcataacaatagaaaaacctagagatagatggtctgaagaggatggaagacgagtacaatacaatttaaaagccaaaaacataattacatctccctgtggaacggatgaatatttcagggtttcaaattgtaagagtgctaaggaaatgtgggacactctacaattaacacatg

SEQ ID NO: 18644 - DNA, 355 bp, Glycine max
ttgcttcttagtttcagatgatgcagatgagtttgtagctacctcatgcactcctctaatgactatagcatcatatttggcgctaaactgttgggagttggaagccatcttctcaattaaatacctggcttcagcaggggtcatgtctccaagggctccaccactggcagcatctatcatacttctctccatgttattgagtccttcataaaaatattggagaagaagctgctcacaaatctggtggtgaaggcaactggtgcataattttttaaatctctcccaatattcatataggctttctccactgagttgcctaatgcctaaaatatcctttctgatggccgcggtccta

SEQ ID NO: 18645 - DNA, 403 bp, Glycine max
tgcttatatcctcaggtagttcagcaaatacttgcttcatttcctccaagctcatattttccaaaatggacggccttggggcaaccctcacaatctcgccgcctttaggttccttaactcgagcctcggctttaatgattagttctgaatttgagcttgctccacatttaattataaatggtgaggtattacccgtattgaattgaaggacgttccactgtgccacatcagttccagatccagagcctgtatccgttgatggcttgcgagaatgtgatagattctgaatgcggtcatcttcttcaggaattgactgcatcataaaagagggattaggaatcccaaaactcaattaaggtcacgctcagacacagattcagatgccagaaatgctgagacagga

SEQ ID NO: 18646 - DNA, 395 bp, Glycine max
  unsure at all n locations
tgcttataaagaaaaatgatggcatgattttaacctaatcacactatattgaaagctattgaagaagtttaattattttgatgtgaaacatgtgtctacttcttatgactcatccatcaagttaaagaaaaatttgagtaaaggaatttcttcacataaatactctcaaattattgattctttgttgcatttgacaaacttctataggcctgacattgcatatgtagttggtagattagaaaggtatactaataattctgatcattctcattggattacattagaaagagtttttagatacttaaaaggaatcattaattatggcattcattatacatgttttcctgcagtaattgaagggtttagcgatgcanattggatttctaattctgatg

SEQ ID NO: 18647 - DNA, 418 bp, Glycine max
tgccagaagttcttagttggggatgctggttctgtttgttactaagatgatgaggaggcggaggatgaagatgagctggtagataatgattctgaagaatctgaggagtataagttctttgaaaaagtgtttgcagaagatggtgaccttaggagatattatgagaacaatcacaaggaaggagatttttattgtttggtttgtgggggtattgggaagaaggtatggaagaggtttaaggattgtattggactaattcagcactccactgccatattaaggacaagaaggaagcgagctcacagagcctatgcacaagtcatctgcaaagttgtaggttgggatatcgatcaaatgccagctattgtgttaaaggatttggattcctcattggctggttcaaagaagcttttcgtga

SEQ ID NO: 18648 - DNA, 396 bp, Glycine max
  unsure at all n locations
ttgtcattctttcagagagatggtggacaaactactcaaggctcagtttatcagagaagtcaggtactctacctagatagccaatgttgtcatggtcaaaaaagccattggcaaacggcgtatgtgcattgactacaccaacctcaacaaagtgtgcaccaaggacacatatgctttgcccagcatcgacaggctactcgactacgtgcctgtgttccaagtactgagttttcttgatgtctatttaggatacaaccaaatcagaatgcacaccccagacaagagaacacaacattcttaactgaagatgataatttttgctgtagggtcatgccctttggcctgatcttcanacaacagatagaccataatcttgaggtttatgtgaatgatatg

SEQ ID NO: 18649 - DNA, 450 bp, Glycine max
gcttatgttgcaaacatttataatagacctcctcaccagcaaaaccaacaacaacagaataattatgacctttcaagcaatagatacaattcaggttggaggaatcatccaaatctgagatggacaagtcctccacaacaacaacaacagcctgtccctccttttcagaatgctgctggtccaagcaagccatatattcctcctccaatgcagcaacaacagtagtagtcacaacaaaaagcaacaagcaactgaggctcctcctcaaccttccttagaagaattagtgaggcaaatgactgaaattctgatactgaggacagatgtcgtacaggatgtcacgacatcgcgcttcagaacatgcagaatgtatatgacagtatgaacagattaaacaagtaaataacacaagagaattgtaacccagttcggtgaacgtccctacatctg

SEQ ID NO: 18650 - DNA, 464 bp, Glycine max
  unsure at all n locations
gcttaatggcttctcgacatanactattaaaacgtacagtgagaatttttatgtcaattgtatctgttatnttttcatcagttccaatatcagattttgcattccttgtccatcgtttcaaaatgtagtgcgatggaagggtaagaacatttgtaacagtgaagacagtcaatatatgtcaacaaagaacgcctgagtattcaaacatctggcagctgcaattcaccttcatttcagagatatttaatgtgaccatgtatgccttgtgatcatgtacatattttgcaaccctgtatttactgatcacaccatcatcctcaacattatttgcagtataagcaaaagtttccaccagttcctcctgagattctgcaaaaatcttcttagtgtacatatttgctgcttgttgttccattggtgatggagtcttcagtacaggtgtgttacaaatagtctcataatct

SEQ ID NO: 18651 - DNA, 391 bp, Glycine max
  unsure at all n locations
agctttgaatggangctctggtctcttgttgaaactgcatgttttgcatagtcatttgcctcacaagttcttcaagggaaggttgcgaaggagcctcaactgtttgctgtttctggggctgttgctgttgttgttgctggattggtggaggaatgtatggtctgcttggggcaatagcattttgaaaataagattgttgttgctgctgtttgggatgattcctccacccgagattgtacctgttgttggagaggtcataattgttctgttgtggctgattttgctgctgaggttgaggaggtctattgtagatgtttgcagcataagcttcaagctgttcaattgcttcagattgttgcacagaagggcaaaggtctgtgtggtggtctgc

SEQ ID NO: 18652 - DNA, 449 bp, Glycine max
  unsure at all n locations
tctaaactntgtacaagaatgaagctctgataccacttgtctctgttatcttaagaagggggggggggttgaattaagatattccaaactgtttcccctaattaaaaatctatttcactttttactcaagttatgaattcccaatgacaatcttcttaaatattaattcaaatgaaacaatttgaatatgaatataaagcaataataaataaaggagattaagggaagagaaaatgcaaactcagttttatactgattcggccacacccttgtgcctacgtccagtccccaagcaacccgcttgagagttccactatcttgtaaattccttttacaatttctaaacacacaaggacaatccttcctttgtgtttagagatcctttacaacaagagactcacagtctcttaatcccttanagaatgagaagaagaagaagaacaaatctc

SEQ ID NO: 18653 - DNA, 424 bp, Glycine max
  unsure at all n locations
ttcttcctctagcttcccaaggaagctaccttccttgcttctcattgaagattcccatgtgctaggctataaatagaaacatgtgtaacacttgtcataactttaatgaatgagaaacacgtgagacacacttcaaagttcaacttctctccctaatctccttcaattcccatccccctctctctctctcattctcttcctccattgaagcttcctttctaagcttcttatccaaggcattctcttggtggtgaatgatgcaatcctacccccccaagggcattgtatagaggactccaagaagattgagctagagatacaagagaaggccataaggttctcatgagccttanggtagacttcgggcccatgggctacgtatgagtccacttatctttatacatattagattaaggtttcatta

SEQ ID NO: 18654 - DNA, 302 bp, Glycine max
  unsure at all n locations
tcttatccaaggctcatctcggtggtgaagctccttcttccatgtcttattccatagtggatggcgcctnctctcacctcttctnctttgtcttccactgcatctccatggtggaaaatcaccattaaaggacctcattgaagctcaaagatccaacctccatagaagccccacaagcaaacttccatcatattcctccacccgggattgtatctattgctggagaggtcataattgttctggtggtggattttgctgctgagtttgaggaggtctattgtagatgtttgcagcataagctt

SEQ ID NO: 18655 - DNA, 405 bp, Glycine max
agctttttggaaatcttgatgccttagtcaacctagtaactcagcttgccataaataaaaaatctgcatctgcatctattactgttgcaagagtctgtggtctatgttcttttgttgatcaccatacagatctctgtccttctttgcagcaatttggagtcaatgagcaacctgaagcctatgctgcaaacatttataatagatcccctcagcagcaaaaccaacaatagtagaataattatgatctttcaagcaacagatacaatctatgttggaggaatcatccaaatctgagatgggcaaatcctccacagcaacaacagcctgtccctcccttccagaatactactggtccaagcaggccatatgttcctcctccaatgcagcagcaacaacaaagacaac

SEQ ID NO: 18656 - DNA, 459 bp, Glycine max
  unsure at all n locations
gctgctttntgcaattctaagacactagagagcttncaagtatatgacttgtcccacgttgatcttttctatctaatatgcatcctgcaaaatcagaatatgaaaaacctgtcatgtttaaggaagtacctttaggataccacataagcaaacacttaccatgatatccaatctacttgcaattaagcaaagaagtgattcaatcatacctttgtatcttgaatgatgcactaatttacctttctcatcaaaggcaaggtatgttgatgtagacatangagcatatgcttctttgcatttcttcataccaaatttctttatcggntttatgcaatatctggtttgactgaagaaagttccatgtttcaatcgcttgactctgagtcctataaagaaatctaattctcccatcatagacttctcaaagtctttcagcatacaacatgaccattccttgca

SEQ ID NO: 18657 - DNA, 409 bp, Glycine max
agctttatgacaagtctatacgtggtatcttccttgggtatagcaatatctctaagggctatcgtgtctacaacttgcaaactaagaaactcgtcatcagtagagatgttgaagttgatgagtacgcttcttggaattgggatgaagaaaaagtggagaagaacgttcttatacccgctcaactacctcaagaagaagctgaggaagaagacccaggtgaaccaccttcacctccaccacaacaacaagatcaagaactatcatcaccagagtctactccaagacgaggtatcttcctttggtggacatatatgaaacctgtaacttggccatacttgaacttggaagctttgaggaagcgtcaaagtaggaagtatgggtcaaggcaatggaagaagagatacaaatg

SEQ ID NO: 18658 - DNA, 341 bp, Glycine max
  unsure at all n locations
agctttttagtcttatctgatgaagatgaattcgtggctacttcatgcactcctttaatgacaatagcatcacttctggcactaaattactggtagtttgaagccatcttctcaattaaatttctggcttcagcaggagtcatgtctccaagggctccaccactggcagcatctatcatacttctctccatgttactgagtccttcattaaaatattggagaagaggctgctcagaaatctggcggtgaggacaactggcacataagttcttaaatatctcccagtattcatataagctctctccactgagtngcctaattcctgaaatatcatttttgat

SEQ ID NO: 18659 - DNA, 440 bp, Glycine max
  unsure at all n locations
tagctacacatacctctctaatagctaagctcatctncgtgagattagaagctagagcttagctacacaccccctataatagctaagctcacccccatgagaaaaaacatganaataacaaaaaaagtccttattacaaagacaactcagaatgccccgaaatacaaggctaaaaccctatactactagaatggccaaaatacacggcctagacgaagganaaacctattctaatatttacaaagataagcgggctcatacttagcccatgggctcgaaatctaccctaaggctcatgagaaccctagggcctttccttggatctctagcccaatctacttggagtcttctagccaatgcccttgcggggtaggattgcatcacgagttgcttcaaggatttccttggtcttgtctttggatgcctgttccaagtctatg

SEQ ID NO: 18660 - DNA, 441 bp, Glycine max
  unsure at all n locations
tgaggatggtgtngcggagatgcgggatcaatatacggataaagttatgcnctctttttactataagngcatggcatatttatgttgctaaccaattatgtgacagactggtatttgaacctcctgtaattctctgaatggatgggtatcacctgtacatgggttcatatggttcactgatgaaatggattcattcaactctacttaatttaaaataaataaatagaactcattgataaacattgttatataataatattntatcactcaaagaagataatcaattctcatcataatcatttttatcaaaaataatataatcctctgaattaattatcacaatacgatagattttgaaaaacatcataataatgaataacctctattttaaaagacaatataatatatagtgatctcaaaacacaaattttctctttcagt

SEQ ID NO: 18661 - DNA, 462 bp, Glycine max
gcttgaaggtgtgtagcccaccatcttttcatagtagaatactggtaatgtgtctactattattgttattattgttttctccgtcattgaggtgccacttgagctgccaagtctctccacctttgggcgtattcttttgaaagattcgtgccccccttttgcacatgttctgtagttgcatcctatctgaagacattatactgacactgcctaacgaaggcaaccactaggtccttccaagaatggactcgggaaggttccaagttagtgtaccaggtaacagctaccccagtaagactttcttggaaggaatgtataagcaattcctcatcttttgcgtatgcctccatcttctgataatacatctttagatggttcttggggcaagtagtccacttgtacttgtcaaagtccagcaccttgaatttgggaggggtgatgatattgggtactacgaacaac

SEQ ID NO: 18662 - DNA, 399 bp, Glycine max
agcttctgtattccttttcgattttctcgatatattacgggactcaatcagacatccgagtaaaaagttattgtcgtttgaatttgctcagagcttcgataatcaattccgagcatctcgatatattacgggactcagtcagacaaccgagtgaaaagttattgtcgtttgaatttgctcagagcttgggtattcaatttccagcgtctcgacatattacggtactcaatcagacatctgagtaaaaacttaatgtcgttttagttttcttagagcttcggtatttaatttcgagcctctcgatatattataggactccatcagacatttgagtaaaaaagttattgtcatttgaatttgctcagagcttcaacattaaatttcgagtgttccgatata

SEQ ID NO: 18663 - DNA, 440 bp, Glycine max
  unsure at all n locations
ntgagcaaattcgaacgacaataactntntactcggatgtctgattgagtcccgtaatatatctagacgctcgaactggaataccgaagctctgagataattcaaacgacaataactttttactctgatgtctgattcagtcccgtaatatatcgaaacgctcgatattgaatgttgaagctctgagcaacttcaaactacagtaactttttactcggatgtctgattcagtcccgtaatatatcgaaacgctcgatattgaatgttgaagctctgagcaaattcaaacgacaataactttttactcggatgtctgattgagtcccgtaatatatcgagacgctcgaactggaataccgaagctctgagcaaattcaaacgacaataactctttactctgatgtctgattcagctccgtaatatatcgaaacgctcgata

SEQ ID NO: 18664 - DNA, 405 bp, Glycine max
  unsure at all n locations
tcagacgatacgcaaccttgcccatcctctccatcaccgcgaatgttccatagtacctctttgccaactttgagtatgatgtctcaaaagctgaggtttgacgatgaggtcgaagtttgaccaacacccagtccccgatgttaaactcttgaggtcgtctttgtgcgtctgctgtctacttcatcttctgctgtgccctgagcagtttccgactgagcagcttcaaaacctcgtcgcgttggttgagcacctcatccaccgtgttgatagacgatgtcccccccaaatattccggaatagcaggtggtttccgaccgtagatgatcttgaacggngtgatccttgtgcctgagtggcatgaagagttgtatgaccactcaacccataacaggaattgcccccacg

SEQ ID NO: 18665 - DNA, 410 bp, Glycine max
gcatgtgcacgctttcaagctattatcgaagttcaacattaaatttagaagtgtttacattattatttaaccaagtttaaattgagtttctattagttttaacacatatactgacttaattagtcttttatttatttatgtatttattttgctaactagaccttctcctataatgatttcgttttctgaaatactaataataatacattctttaatattccgtattttttttacccactctcttgttaaaagaaaatttgttcgggcttcattaaatatgagaatctcattattctatatgtatctgtggagtcttatttctaaaacggtggaattaattcacataaatttcaagagagttggtacattaaatgtaagggacgttgtggtgtgatttggctcgatattta

SEQ ID NO: 18666 - DNA, 403 bp, Glycine max
  unsure at all n locations
agctttcttattcatttttcaagttacaagtgaactccccaagaagtgacatggcccacttgtggttttccaatctagcttacattctgcaaagttagaatatgaaaatccaattaaactcaaggaggtacctttggggtaccttaaaccaacattggttgtgcccttaaggtacttaataatccttttgacaacatttaaatggtattccttgggattttatttatatctttcacatatgcacacacttagcatgatgtcaagttggcttgtagtcaaatataggagataaccaatcatacctctatactttgactcatctaccgatttacctttttcatccaagtcaagataaatggatgttgccattggtattgtttcttccttacactnttccatattg

SEQ ID NO: 18667 - DNA, 438 bp, Glycine max
  unsure at all n locations
cgcctttaacgataaaaataacacaaattgatcttaaaattatattttatctttaaataaaacgattttcaattctatcaaattagtccaatagaaatatattaatatttaagtctaataaaaaattattgacattttcatccaataataataatttattaacattttttgtccaatagaacttactcatatctaagtcaaaacaatgagtgacatttccctcgaataagaaatatattgacatttccgtttaacaaaaattattgatatttacgtccaaaaatgatatcttattgatanttttgtccaatttaattagcatgatcacattgacaatcatttgaatgataaatctatccttttgtgtcatgtagaactatttattaatcacaacgaacaatagttaacgaccgactantattatcacacttcttatat

SEQ ID NO: 18668 - DNA, 443 bp, Glycine max
  unsure at all n locations
tgagcacctcttccttcattgatgggttgagccttctctagggctgtttgacangtctatattcttcctccattattatcttgtgcatatagtaggcaggctgattccttttagatctaatatgtgccacccaattgcctccttctgtctcttgaggaactctatcaacctatttcttcttctgttgtaagcttactattgatcaccacaggcttggtcttgttctcttccaagaacatacttcaggtggttaggtaagatctttagctccaccttggtcttctcaggtggacttccgcttttcaattcttcaaaactggtcccccctgcaggcatattttcttcacaatctaagccttccaagcaagcccataaattcttcttctcttcactggttagacaatctacaacattggtcaaagctttctccagtaaagtttatg

SEQ ID NO: 18669 - DNA, 443 bp, Glycine max
  unsure at all n locations
tatacggcctangatgtggttttgtgactaaattcaatttagacacaagtcttgcacttgccacattgctacaactccctccatcattgatcatcatgcaaactttgccattgatcaaacatctagtgtggaaaatgttttctctttgactttcctccatagacttcaattgatggccaagtaatcatcaacaattctccctctggtgttttctccacttcctcctcctcatcctcactctcttctcccttttcaactttggactcactaatgtactctccgtctctaagaatcatggatttcttgatagggcactcatatgcataatgtcccaagccgtggcaccgaaagcacttgacatcccgacantttttntaggattgttcttggacatttggaggagttnttgatggtatangtgttgcattagaggtggcaacccc

SEQ ID NO: 18670 - DNA, 368 bp, Glycine max
  unsure at all n locations
agcttttggcaagtgtagcaacatagtatacggaaangatgctctagctgtggatagagcacggcacactgctggagaaatcgctataagagatcacgggccaattttaattgaggtgcaatcagctcccttcatgcgtaagacgatcattgcctgatgccacatcattttaatgttcaccgagctgatgctaatggctatataaccttcaggctctcactcatgcagtcggacatcactctacatctgatgagtaaactaagtaccggggaactgatgagatcgaatattggaatatggcaaggaatccagtgaatacggccaaaagacgggtagaaaggaatggttcggggagtgacaaggatgaa

SEQ ID NO: 18671 - DNA, 393 bp, Glycine max
cctcattgcagtcatttcacacaacataacccacatgacataagattaagacatggtgtgaaggaacttaccgtacgtttgagcaatcctataatttcttgatcttgccaaagccttatgtcaacaatattagcaagcaaatcaacctccatcaaaatgtgggattgttcattgggatgctgacttggcttcctcttaatttcttcttcctttacgattgagaggataataatcttagacattacacaataataatatatagatcaattaaaataagcatcatatctatttcacacttcttaatattacacctataaagtcacatcaacgtcttcattaccttgtctcgacttttcattgaacctttcctctaatatacacaccgacacctct

SEQ ID NO: 18672 - DNA, 451 bp, Glycine max
  unsure at all n locations
tatggcctcatcaaaatacttgtttcccgagggaaattctataaatagatctctcatctntaatggagtgggttaccactactggaaaacccgcatgcaaatctttatagaggcaatagatttaaatatttgggaagccatagaacaaggaccttatgttccctctataatagccggaagtgcaacaatagaaaaacctagagncaaatggactgaggaagaaagaagattagtacaatataatttaaaggccaaaaatattattacatctgccttaggtatagatgaatactttatggtttcaaattgtaaaagtgctaaggatatgtgggatacactacaagtaacacatgaaggcacaacagatgttaaaagatctaggataaacactntaacgcgtgagtatgaactntntangatgaatgtaaatgaaagtatacaagacatgcaa

SEQ ID NO: 18673 - DNA, 396 bp, Glycine max
  unsure at all n locations
agctttggtctagtttttctaaagcaaaggtttgttcattttgtgtgtatcaagattactatccattcaatatataatcacttcttgattaggggtttctttctaaatgaaggttacacggtaaaggaaaagtattgaattataactcccgaaaaaataataatacaatacttctgacctttaattttaacacattcataattattagatttttagaacagttatttcaaaagtcaataatcatttatccttttggtatatttagattaaaaagaaaaggtattataaagattntacacaatcattaatcactatatgataatttcaaagacttttaaaatatttatcttanaataagttaaaggatgatttgtgattagatgataatataatcag

SEQ ID NO: 18674 - DNA, 426 bp, Glycine max
  unsure at all n locations
tgagcacctcttccttcattgatgggttgagccttctctagggctgtctgacaggtctatattcttcctccattattatcttgtgcatatagtangcaggctgattccttttagatctaatatgtgccacccaattgcctccttctgtctcttgaggaactctatcaacctatttcttcttctgttgtaagcttactattgatcaccacaggcttggtcttgttctcttccaagaacatacttcaggtggttaggtaagatctttagctccaccttggtcttctcaggtggacttccgctnttcaattcttcaaaactggtcccccctgcaggcatattttcttcacaatctaagccttccaagcaagcccataaattcttcttctcttcactggttagacaatctacaacattggtcaaagcttt

SEQ ID NO: 18675 - DNA, 453 bp, Glycine max
gtttaagtgaaaggatatgactcttcacatttgtttttgaatttctttattcaacggcactagtaattgattaccaaaacattgtaatcgactatagctttttgaaaataattggaacgttgtaaattcagtttgaaaactttttcaaactcattttgctactggtaatcgattacaacaatatggtaatcgattaccagagagtaaaaactctttggtaaaaggttatgtcaaaaattcatgtgctatgcaaagtgttagtgcttggctctactgagttttaaaagaatggctaaaattctgttaaaacataagcacttagacaatgaatgaaagctggagttgctgcacatgatgtctaacattatgtcaaggaatcagatcgggctgcacaatgcacaatgcacgatataatgtcatatgaagaattgaagctgcaagatccacgatgtc

SEQ ID NO: 18676 - DNA, 455 bp, Glycine max
  unsure at all n locations
tataaaactcagctttaattngttgtttgtcttgatagtatttaaattactttttactagatgagttcaataatcaaatgtgataaaattgctgagcataactataaatgttattcaatctatcatgttatcacttttagtaaataattattctttattttattatcatatttattattttattaaatcgttaattcgacaagtctttgattaaattataggcttgttatcatgaagagattatgataatgagaaaaagttatttataatttcattctaaattgttcttgattgtaagattattgtgaatatgatatcaataatccggataagttaatatatatctaatggtctttattggataaagatcaatagatctaatttattaaattgcatataacgattatgtatatgtggatgttataattaaagcgacttaattgagaattcctaat

SEQ ID NO: 18677 - DNA, 392 bp, Glycine max
  unsure at all n locations
agcttctacatcagtatccttctattgtgctggaactacttcacatggacttgatggggcctatgcaagttgaaagccttggaggaaagaggtatgcctatgttgttgtggatgatttctccagatttacctgngtcaactttatcagagagaaatcagacacctttgaagtattcaaggagttgagtctaagacttcaaagagaaaaagactgtgtcatcaagagaatcaggagtgaccatggcagagagtttgaaaacagcaagtttactgaattctgcacatctgaaggcatcactcatgagttctctacagccattacaccacaacaaaatggcatagttgaaaggaaaaacaggactttgcaagaagctgctanggtcatgcttcat

SEQ ID NO: 18678 - DNA, 364 bp, Glycine max
  unsure at all n locations
agctttgtcactggtattcatgtttcatttaggccttttaagtatatgcattttgatttatggggaccatctagagtgaaaactcatggtggaagctcatactttctcaccatcatagatgatttctcaagaagagtatggccgtatgtcttgaaaatacaatcagaatctttttccaaattcagagagtggcatactcttattgaaaatcaacttggtacaaaattaaaagttntaaggattgacaatggcctggagttngtttcagagcaattcaatgagttntgcaggaaagtatgtatcataaggcacaaaacagtccctcacacaccacagcagaatggattagcataaagaatgaata

SEQ ID NO: 18679 - DNA, 477 bp, Glycine max
  unsure at all n locations
ctcaagtacaataaagaagcctanatggactngaaggtcttgccaacccacttgaagtgtgtgttcttgaaagagaacaatgcaaaacctgtggtgatttgcaatgatttatcttctaatgaagagtctaggtgggtcgaagtgctcaaaaagcacaaggcagtcattgggtggcacattttggacctcaagggaattagcctttcttattgcatgcataaaattatgatggaagctgactataagtcggtgagacaaccacaaagaaggcataatccttcgatgaaaaaagaggtgcacaaggaagtccttaaactcctagaagtagggcttacctatcctatcttagacagtgcttgggtgagttcagtgcaagtggttcccaagaagggtgggatgactntggtgagaaatgagaaaaatgacctcattccaatccgaactgtcatgggatggagaatgtgcatagaatatcgg

SEQ ID NO: 18680 - DNA, 403 bp, Glycine max
agcttgtgcattcaatatcctgatgatggtgttccatatgttctcaagactggactaatacatttgcagcccaagtttcatggtcttgcaggtgaagatccttataagcatcttaaggagttccatattgtttgtttcaccatgaagccccctgatattcaagaagatcatatctttctaaaggcttttcctcattctctggaaggagtggcaaaagattggctatactaccttgctcccaggtctattttcagttgggatgaccttaagagggtgttcttggagaaattcttccctgcatataggaccactgccatcagaaaagacatttcaggcatcaggcaacttggtggagaaagattgtatgagtattgggaaagattcaagaaattgtgtgcaagct

SEQ ID NO: 18681 - DNA, 407 bp, Glycine max
  unsure at all n locations
taaggcacctgaatcgtccaaagtaaaagtcaccttatgtgagattatgttntataaattataatttataacttatcttatgatttaacatgctaaaacatttatactatatatacgcacggaactatatatctctaacaatttaatatatgtgcagttaaaaaaattaatatatatgttaaaataattccatgaatcgaactaatctaaatctttgatatattaggaactaatcattttaggtctcttcaattttcttcttattttttcactactacaaaatatagacttaacatcgcatgattaacatcggtttttcaaaaaatcgatgttaaaaaaagcacagtaacatttttgtaaataagttgagttggttaacattggttntttaaaaaccgatgttaaca

SEQ ID NO: 18682 - DNA, 395 bp, Glycine max
agctttatgaggacagtgcaatgcagcaggtgtttttgatgaacaatctttattacctagtgcggaaagtgaaggactcggacctagggaaggtcttgggggataattggattacgaaacgccgtggtcagatacgccagtatgctacagggtatctcagagcctcttggagcagggccttatcttgtttgaaggatgaagggattggagggagctccaataatgcatcaaagatggctttgaaggagaggttcaagagtttcaatgcttgttttgaagaaatttacagggttcagacagcttggaaggtaccggatgaccagcttcgggaggagctgcggatatctatatcagaaaaggtgattcctgcataccgctcgtttgtgggaagattt

SEQ ID NO: 18683 - DNA, 451 bp, Glycine max
actaagcttatcatcgttgcttccacattgaaacggttgtgctggcctatgtttttactatagtagacgtacatgtgtgatattataaagatggaaagcctacactacccttctaaatctaccccaaagtaactttttaataaaaatattcattctttattgtaatattattttttaattaatagtattacaaatagttgcattgtttcattgaacatgatatacgtcctggacgaggataaatgcaatgcatatatgaatttaacctacacttatttttaagttgtcaatcaaaaatccctctttatatagcttttagaatatttattatttcccattaaaaatatctattattaaaattaaaaaactaatatctatcataatttatgatttaataacaataataaaatatactcgcaatatatatacatactattttctattactcttt

SEQ ID NO: 18684 - DNA, 398 bp, Glycine max
agcttttcagctatttggttactctccctaagagaatggagccaaacaaagcttccttgttgttcctcaaaagccttgaaatttcaaaacatgctttaagacaggtgaaatgaagggcagccatgattcagaagtgaaatagccacaaaggaatcagattccaacatgaattgcttgaatcttctactccgtgcaatttcaattccaagcatgatagcctcgagttctgcagttacaactaaacaatagcatacatcaataacaaaagagaagttcgctttgccattataatccttgagaactccaccaacaatggccttcttcgtgtctctattgattgaaccattaatattgagtttgaactagccatttgaaggcttgctccaactaatgctttt

SEQ ID NO: 18685 - DNA, 447 bp, Glycine max
ttgatagtgaggaatcaatgggtccagataggttgcatgatgacatactcagaacttcaagtttgtgcaatgaagatatggcttggcaccactcgtttccaattgcagataccttgacaccatctagatacaattctgccagttttgtgaggttttgcaagagtgtacctatatttggcttctcaagttttagagtatgttgcgaggtaaatgatgtagacaagtcaagagtagatagcttggttagatgagcaatctcaattggaatttgcccttgaaacccagcatttgacaagttcaaatacctcaaattctttagcaagccaaactttgaaggaatcatcgaagaatggatgtcattgtgtgccaaattcaaactttgcaaatattgtaggttgaagagacttgaattgtccaagccttcactgataaattcttcactcaagt

SEQ ID NO: 18686 - DNA, 442 bp, Glycine max
  unsure at all n locations
tccccgccttcaaggtcgcatctctattcctagacttggnttgcttacaccacagcttccctcgaagcatcatttctgatagagatcctgtgttcttaagctccttctagcgagagcttttttgactcagtggcacccatttacgtatgagcacgatgtatcacccacagaccaacggccagatcgaagtgatggaccatgtgttagaacaatacctacgttcatttgttcattcccaaccggcaagttggttccgttacctagccttagcagaatagtcgtataatacttccctttattccagttcaggctntactccgttcgaggcaatatacggcaagccaccaccagtgttgccccattatcttcctggaatgaccaacaacgaggcggttgaatcactggtaaagctctgatagaagatccatgcaaagcttcaatg

SEQ ID NO: 18687 - DNA, 386 bp, Glycine max
agctttatgccatgctacaatggttctccctgacatctccgcggcagctccgaggatttcttggtctaattggattctatcgacaatttgtccagaattatgcccacatcgcagagccactcactcgcctattgcgaaaagaacaatttgagtggtctcccgaggcacaattagccttcgacgatttgaaaatagccatgacaaccactcctgtcctctccctcccagacttcacgattccctttgtagtggaaaccgatgcctcagggacaggcatgggtgtcattttgatgcagcgcagccatccaattgcctacttcagtaagcaattctatcccaaattgcttcgttcttctacatacatctgcgagttgcacgccataacc

SEQ ID NO: 18688 - DNA, 445 bp, Glycine max
  unsure at all n locations
taaggtaaccttttggtcctccacactcatttctaagttatcatttcccatgtccaaaacacattttgcggtaagcatgaatggtcggcccaatatcaagggaatatcagaatcctcgtctatgtccattatcacaaaatccatcggaaaggtgaattggcgaaccttaaccaagacatcttcaactacaccatatggtcatgtaatggaggggtctactagttgaagagtcattatagtgggagctatcctcgggttctcaattctccgacacatagaaagaggcataaaattgatgctcgccaccagatcaatgagagctttacccactgacacagtcccaataaagcatgggatgatcacacttcctgngtctttgaacttctgtggtagaattctatggatcacaaaactacaatttcctttcaccataatgctctcattg

SEQ ID NO: 18689 - DNA, 421 bp, Glycine max
  unsure at all n locations
tgtcagaacttgttntaacanaaacaaagaaatttcttgatcaacttagtagcctcatacttatttttcattaaatataaccatgtaaacctagaactatcatcaacaatagtcaaaaagtaatgttttccatcatgagtagcatgttgatatgggccccacgtgtctacatgtatgagatcaaatggggactcaaaataatggttatttgaaataaaagagagccttctanatatggacagggggcagatcatgcaatctttagaactatgagatgtcaaatgcaatgaatttttatttgcaaaaagtttcaaaatcttgtcagatacatgtcccaaatgggaatgccacaaagattgttcactaagaacattacaacttgtaactacattattancaattgaagaatgtgaattcacaa

SEQ ID NO: 18690 - DNA, 485 bp, Glycine max
  unsure at all n locations
tcaagtatacaactaatactaacattgccatgagaacaactattgatgattcatggttatggcattgaagatttggtcacttcaacactcaagctttgatgttgctgcctcaaaataatatgatgagagatctaccatgcctatatgactataatgaagcttgtgaaggatgtcttcttaaaaagcaacaaaattaccattttcaactaacaaagcatgtagagctaaagactcgtcagagttaatccacactaacatttgtggaccaatgaggacatcgtcactaaacaacaacaggtatttcatcctctttattgatgacttttctagaatgacttggtctacttctttatagaanaatcaaaggtctctggaatgttcaagaatttcaaagctcttgttgagaaacaaagcacgaaacatatttaaagtaataagaagtgttcaacgcanagaatataactcacatgagtttgataagttat

SEQ ID NO: 18691 - DNA, 341 bp, Glycine max
  unsure at all n locations
attnttatatatacacgcgcgaaatggggtggacgtgcgatgaggctggtaacatgaatctataggccactgggccaatgcgcgccgttatctgaaagggtccataaaaccgcttggctagctaggaatatgtcggagccagcgacgtctgccggtatggtcggaagcggacgtgtacccatacacccacctcataagatatatcgcggcggtgtttatcggcagcaaccttcatgagttcctgcgctcgttgaaggcggcgcgtcaattgcgcgtgtacttgcagacgcgtggtgagtagcgagtcaacggcatcattcgacgattgaccttggagatag

SEQ ID NO: 18692 - DNA, 302 bp, Glycine max
ctggaactacttattttgttttcatggcgcctatgcagggtgaaagccttggaggaaagaggtctgcctatgttgttgtggatgatttctccacatttacctgcgtctactctatctgagagaaaccagaatcctttgatgtattcaaagagctgagtctcagacttcaaacacaacaggactgtgtcatcaagagaatcaggagtgaccatggcagatagttctaacacagcaggttcactgaattctgcacatctgatggcatcactcatgacttctctgctgccattacaccacaacag

SEQ ID NO: 18693 - DNA, 341 bp, Glycine max
  unsure at all n locations
tattcntttcattcaattctgagcgtctcgatatatgacgagactcaatcagacatccgagtaaaaagttattgtcgttttaattggctcagaggttcaacattaaatttcgagcgtctcgctatattacgggactcaatcaaacatccgagtaaaaagttattgtcgtttgaattggctcaaggcttcaacattcaattttgagcgtctcgatatatgacgagactcaatcagacatccgagtaaaaagttattgtcgtttgcatttgctcagaggttcaacattgaatttcgagcgtctcgatatattacgggactcaatcagacatccgagtaaaaag

SEQ ID NO: 18694 - DNA, 451 bp, Glycine max
  unsure at all n locations
ttgagccaattcaaacgacaataacttttactttttgtgtgatgagnctcgaaatataacgagacgctcgaaatagaatgttgaagctcttagccaattcaaacgtcaataagtatttactcggatatctgattgtgtcccgtcatatatcgagacactcgaaattgaatgttgaagctctgagccaattcagatgacaataactttttactcggatgtctgattgagaaccgtaatatatcgagacgctcgaaattgaatgttgaacctctgagccaattcaatcgacaataactattcactcggatgtctgattgagacccgtaatatatcgagaccctcgaaattgaatgttgaagctctgagccaattcaaacgaccataaatgtatactcggatgtctgattgagtcccagtatatatcgagacgctcgatatagaatgttgaatc

SEQ ID NO: 18695 - DNA, 416 bp, Glycine max
  unsure at all n locations
ttcttttttttaaattacgagcgtctcgatatattacgggactcaatcaaaactccaaattgaaagttattgtcattttactctttatagagctttcgttntcaatttcgagcgtctccatatattaaagggctcaattggacatccgagtgaaaagttattgtcgtttgaattttctcagagcttctgttttcgattacgagcgtctccatttattacgggactcaatcggacatccgagtcaaaagttatagtcgattaaatttgcacagagctttagttttcaattacgagcgtctcgatatattacgggatacaatcggacatccgagttaaatgatattgtcgtttgacttttcttagagcttccgttttcaatttgagcgtctcgatatattacaaggctcgatcagaca

SEQ ID NO: 18696 - DNA, 429 bp, Glycine max
  unsure at all n locations
ntgagcacattcaaacaacaataacttttgaatcgaaggtcngattgtgtctcataggatatcgagacgctcgtaattgaaaacagaagttcttagaaaaatcaaatgacaataagttttaactcggatgtcctattgagccctgtaatatatcgagacgcacgaaattgaaaacggaagctctaagaaaagtcaaacgacaataacttttaactcggatgtccgattgagtgccgtaatatatcgagacgctcgtaattgaaaactgatgctctgagcaaattcaaatgacaataacttttaactcggatgtccgattgagtcccgtaatatatcgagacgctcgtaattgaaaacagaagctctgagcaaattcaaatgacaataacatttcactcggatgtccaattgtgtcccagaggatatcga

SEQ ID NO: 18697 - DNA, 436 bp, Glycine max
  unsure at all n locations
agcntttattttnttggaatcaaataaaacaccaagatagtctcatattgtaaaattgccaaatcgtgtctcaatagaattaattgattgatctaatatgtataaaaaatactcgatacgaaaagattcttcaggtgaatgtgtgatctcattactaatattttcatcaaaatgagaatttctattaattttacgtttttcacgaaattttggctttatatccatttcgatagccattttttctgtggattttaaagtcaatgcaaacccattttccctataatgttttaaataagtgataagaccttttaaatgatctatggcaacatctatatgcatancctttgattgtagaattttgctaatagaattgacagcaaacaaaatatcataccanatattcattcctaataacaattcacaatcttcaagttca

SEQ ID NO: 18698 - DNA, 493 bp, Glycine max
  unsure at all n locations
ngtgacgatatttaaaanatgacaccaaatataaataaagggtaatattatattgcgacattttatcaaatattgtctatatcacatgtcctgctaaagcatttagtgatatgaactatatacaatatttgataaaatatatattacaaaaacatattaataacaattattcatatttgatgatattttttaaatgttgtcaaaaactattcacaatatttttactaaaatgtgacggtgtatataaatgggtagtaaatagtaatccttggtcattccctagtattagtacaactattcatgtatattcacaaatgtacgtagatatttattaaaatatttttttctaagaagtaaaacataaaataaaaattgaaatatatatgtatacaaaacataaattagaattactctatatatgataaagaacgtntaaataatgtcacattacacgtacctacatgtatgagtacctcattatatatccatcatt

SEQ ID NO: 18699 - DNA, 424 bp, Glycine max
  unsure at all n locations
agctattgttacgattcactgngacagtcaaagtgtcattcacttaacaaatcaccaaatgtaccatgagaggacaaagcacatagatgtgaaactacacttcatcagagatgtgattgaatctgagaaggtgaaggtggagaaggtttcacagaagaaaacctggctgatatgtttacaaaatccctctctagtgtcaagttcaagcactgcctggacttgatcaattttgaagatgcctaaagcagatngatagaagtgcagccttgaatcacaatgtagacacttgcttgattggagtcaaggtggagatttgtggtgtgtgactcanaatcacaattggcacaagtgagaaggctttanagtggtgctgtcataactgttntcagttattataacntgaattagtttggcaccaaagtat

SEQ ID NO: 18700 - DNA, 339 bp, Glycine max
  unsure at all n locations
ttcacgagagcttccgttgttcaatttcgagtgtcactatatgtgatgcgcctaaattggacattcgagttaaatgttatgaccatttgagattctcaagaacttccgttgttcaattctgagcgtctcgttatgtgatttgcctgaatcggacatccgtgtgaaaagttatgaccatttgaatttctcaagagcttccgttgttcaatttcgagcctatcgacatattatgcgcctgaatcagacatccgtgtganaagttataaccatttgaatttcatgagaagcttcgttgttcaatttcgagcatctctacatattatgcgcccgaatctgaca

SEQ ID NO: 18701 - DNA, 432 bp, Glycine max
  unsure at all n locations
ttttttgatatggagatcaaattgaccttgaagctatgtatatatacaacatcctctaagtatagaaactgagaaaattgcactgtgcctacatgagttgcaatgactgtgtggccaatgggaagcttaaaattatgggatttatcttcttacaagaagaaaataagtaaggaaaagttatgacatgatcagtggcttctgaattgagtatccattcatctggacctgtcttgcttacactacaagtaatggataagacattacctctgtgtgcattgctggaaccaatgattgtactaatttgattcacatgntgaattgtgtgactcgagctctattgctacagcanggccattagagccttatattgttgagaagtcaactntattatagtactttgctcatcttgattgttggtaactcattggcaag

SEQ ID NO: 18702 - DNA, 386 bp, Glycine max
  unsure at all n locations
atcttgtttggntctacttctctgatcatctggtaataaagccaatttggaaaatttcttgggactcactatctcaagtttctcagtaatttccttgaatgctggaacaaggccacgccttatgaagcacccttctataagccgcatcgaatttaactcggggagactaggagcatcttttaactccagatccaagcaaaatggggagtcttttagccacatcctgagagagtgagccttggccacaaggatgccttgtcgtgtcttacaaggaagaaaaggcgatcccatttcccanaggcatgccttcaatgtgctgtcaagagataccatgttatactctngctgttcccgtataagtacaactggatttggtgactctggat

SEQ ID NO: 18703 - DNA, 438 bp, Glycine max
  unsure at all n locations
agcttatggttattgtaaggagaataaaacaatccanaatcaattgtacctttcaagtaacgaagaattctttttgcggcttttagatgtggagaggtaggagccttcgtaaagagacacacaactcccaccgcatatagaatatcgggccttgtattggctagataccttaaactccccacaagactcttgaagatcgtggagtctaccttctgtccttcatcaaactttgataacttcaagccaccttccataggtgtgttcacaggattgcaatcaagcatattaaatttcttcaacacttcttttgtgtacctttcttgtgagacaaagataccattctccgtttgcttcacttccattcccaagtaatatgacataagtcccatatttgtcatatcanattcacgagacatggactccttgaagtcttcaaac

SEQ ID NO: 18704 - DNA, 465 bp, Glycine max
  unsure at all n locations
gttataggtttcatatatgtctcaccatagatcttactcgtcttggagtagactctggtgatgatagttcttgatcttgttgttgtggtggaggtgaaggtggttcacctgggtcttcttcctcagctatttcttgaggtagttgagcgggtataagaacattcttttccactttttcttcaccccaattccaagaagcgtactcatcaacttcaacatctcaactgatgacgagtttcttagtttgcaagttgtagacacggtagcccttagagatattgctatacccaaggaagatacctcgtatagtcttgtcttcaagtttgtgcctcttcacgtctggaatataaatgtagcatatagatccaaagacccttangtgctntgctgatggcttcttnccgttccaagattcaattggagtcttgtcttttacagacttnagtggacatctgttgagtgtgt

SEQ ID NO: 18705 - DNA, 426 bp, Glycine max
  unsure at all n locations
ttctttatgtttatgaatcaagttgattcaagaagtttagataatgacaaagatgtagacaaaaagcccaaagaatgatgtcaagattaaatcaagaacaaattcaagaatcaagagaagtttgatttcaagattcaagaaaagatgaattcaagttccaagagaagaaatcaagaagacttcacaagggaagtattgaaaagatttttcaaaaaacaacatagcacnagtttgtttttcaaaagagtttttctcacaagtttctaagttaccagagtttttactctctggtaatcgattcccagtttcctataatcaattaccagtgacaaagtttgatntcaaaagttttcaactgaatttgcaacgttccaattgatttcanaatggtgtaatcgattacaagatattggtaatcgattacca

SEQ ID NO: 18706 - DNA, 483 bp, Glycine max
  unsure at all n locations
gctaaccttagttcatcgctgttgatcccatggtcttatcttatactttgccacattatatcaccttgaccatttataaggccactagtctcctatggcacctagacttcattcccttagttttaacaactcattagattctcacttcactaatacattggacagaaatgtgtataaccttttttcttttgtaaactactctataagggctcacatcacctctctattaagcataatatattttacaagctaattacataatatatttaaattggactcatccattcatataacataaataaattccaatctaagaagaggaaataaagataaaatttatacacttagaanataaggcatataataaatagaaatttataacaaaactcaattcatacaagtcatctcatatacaagtacatcaacaaaatattgtcaaaccaagatatcatagttcaattactaaacatcaccatgtgacat

SEQ ID NO: 18707 - DNA, 478 bp, Glycine max
tgagagagagacaccttttggttgcaaacaatgtataataaataagtgtgacacctaaattccaagcatgcaaaggttcaacatagaaataacaaaactaacataaataaataaagggggggaagagttgaatttcatgaatggattacaattaccaatggtgggggaaagatcttcaacagaacttgaaataaagctgacaagtatgctactttttaccaccccggaatctccaatcaacaagatcttgaaagagagatcatagccactgctctgacctgaggatgaactcattctctcttcctctgatgaatgtcttacgtgtgtgtgtcaaaaagtacagtgaaagatacgtatgcaagggtgagagatatatagaggcttatggtgttgggctacggaaggctaacctgtaacgaagacaatgtggcaaccctttcattattggtggagagataatactgaagagagagagata

SEQ ID NO: 18708 - DNA, 416 bp, Glycine max
  unsure at all n locations
agcttgtcttttagtttatcgtctattctatatgcaagtatagatagccaggccaaaactgcccagattccatctttctcacgaatatggtcagaacctatccacaagcacaaggaataatcacaagataaaaagtttaaaactaggttctaataaagttgagagttgtactttgctcctcttaatgcaatagcaaacacataccagtcccaaaactttcttcaccacagactgaacataatccagcatccattaaattaccaaagaacttccaacccgtggggacctggttgtgaataacaattaaataaaataattgcatgtctaanagccatcaacaagtagtttcatacttaaaagacattgaagagcaatatacctcanagaatctcanattcagatgtttggcaacaaca

SEQ ID NO: 18709 - DNA, 429 bp, Glycine max
  unsure at all n locations
agcttttatgatatgattacactatcaagtataagccagggtttgctaatgttgttgccgatgcgttgtccagactcttctcgaccgaggtctcctgcttatcattaattatgcctcatttcactnttttgcatcaactccgtcacactttgttacaggatccccaatatgttgatcttctgcataccattaaattgcgcccagatgctcactccaacctcgccattcataaggaccttattttccgacaaggctgtatttagattcccttcccaaccccttttactgccttactcttagaggaatttcattcttctcctctcggaggtcacacaggggtatcaaaaactctccattgtttacgacaaatatttgattggccacatatacaganagatgttcgtcggtacatcgcgcaatgtcccacgt

SEQ ID NO: 18710 - DNA, 429 bp, Glycine max
  unsure at all n locations
ttcttttctttgcaactaaatcttgctttctttagttaattntataaacagtattttacatgtatgaattattttcgaattataaaaatttataaattaaaatataaaaaaataatatttaaatatttttattattntaatttacaggtatttaattttatcacaatattttattataatataaattaatatattattatatataaaaanttgttcttattntattatgattntaaaaaaactacataaactaacatatagattatntaataaaattattttatgtaagttatacgaattaagtaaattaaaataacatttanataatataagaaattgaaaatttattattttttataattaanataagaatttgtattaattatatataaaaataaatntacatggctcttgtannatacataaaat

SEQ ID NO: 18711 - DNA, 462 bp, Glycine max
  unsure at all n locations
tatgctgcanatatttacaatagacctcctcaatctcagtatanaaatcaaccacagcagaacaattatgacctctccagcaacaaatacaaccctggatggaggaatcaccctaacctcagatggtccagccctcagcaacaacaacagcagcctgctccttccttccaaaatgtagctggcccaagcagaccatacattcctccaccaatccaacaacagcaacaaccccagaaacaaccaacagttgaggcccctccacaaccttccctcgaagaacttgtgaggcagatgactatgcagaacatgcagtttcagcaagagaccagagcctccattcagagcttaaccaatcagatgggacaattggctacccaattgaatcaacaacagtcccagaattctgacaagctgctctctcaagctgtccaaaatcccaaaaatgtcagtgccatttcattg

SEQ ID NO: 18712 - DNA, 417 bp, Glycine max
  unsure at all n locations
agcttctgttttgttaaactggttcccagaagacaacagggagtgaagattgctgaanaccctagccttgcaacaagtcctagggaagtagatacggagatggacaagaaaatctgcagtattgtgagtagcattttgaaagacgcctctgtgcctgaagctgatgaagatgtcccaacatcgtccaccccanatgtttctgtgcctgatgtcaataaagatgttccaacatcttccggcccanatgctgaagtactctcttcccccagcaaagagagatcaacagaggaagatgatcaagccgcagaggagactcctacaccacgggcaccagaacctgctccaggtgacctcattgacttagaagaagtcgaatccgatgaagaacccattgcanacaggttggcacctggcatt

SEQ ID NO: 18713 - DNA, 433 bp, Glycine max
  unsure at all n locations
agcttgtaatttttatattngaatatatttgnatggtctatttatgtagatgtttatattttgataaatgaatagttttaggtagtgtaagataataattttgtatagtttagtttgaattcttaatgttatatgctacattagatttagtttaaatcttttttatgataaattaggaatagttttacatactctaagttattaattgtatatggtagattaggaatagtttacattgttatatgatagattaggtttagttgaaattttttgtataatagattagaaatagtttgaagtaccgtaacttattaattctagattagctttagtttaccatttntgtccgccacgttgcgtaataggattgaaggtctcctctacttcaaaccttgtggagtggatgtcatacacgcgaacgatgtgcgaacaa

SEQ ID NO: 18714 - DNA, 392 bp, Glycine max
  unsure at all n locations
catgctgngttgtatacgcagtgtatcacagtttttttagagactgccaaaccgctcagtaactagctcaacaaggacgctgtgtacntgctcgatgaatagtgcttgaacgcattcaacactatatagaccagcctagtgtctactaccgtcattacaacaccagattggagccaagaatttgagctcatgtgtgatgcaagtgattatgttgtaagcgctgtattgggccacaggaagggtagagttttccatgctatctattatgccaataaagatttaaatgatgctcaattgaattatggcaccatatataaggaaatgctcagccttgtctatgctctggagaactcagatcatacttaggtgatcaaagttattgttacactgac

SEQ ID NO: 18715 - DNA, 469 bp, Glycine max
  unsure at all n locations
ggcatgcaatgtcttttatatactnnntgtacaagaaatggaaaagctctgatacnncacttggttagaaaacaagtggccctcagaatattcttanagaaaggggnnggttgaattanagaatanntcacaaacttattccctttaattaaaaattcttaatttgatttntaacccaaatcctaagattccttttaaaatgaattcctaaataattattcaaattaaacttactgaatagaagcaataagcaataataaataaaagagtttaagggaagagaaagtgcaaactcagttttatactagttcggccacacccttgtgcatacgtccagtccccatgcaacccgcttgagagttccactcaatcgcaaaaaccctttacaagttctgaaccacacaaggacaacccttcctttgtgttcagatttctttacaacaagagaccctcggtctcttaatccctt

SEQ ID NO: 18716 - DNA, 436 bp, Glycine max
  unsure at all n locations
agctttcttgatanaattcctaaagaagctagagcttagctacacacacctctctaatagctaagctcacctccttgagatgagaagctagagcttagctacacaccccctataatagctaagctcacccccatgacaaaatacatgaaaatacaaaaaagtccctactacaaagactactcaaaatgcctcgaaatacaaggctaaaaccctatactactagaatggccgaaatacaaggcctaaacaaaggtaaaatctattctaatatttacaaagataagcaggctcatacttagcccatgggctcgaaatctaccttaaggctcatgagaaccctagggccttcccttggatctctggcccaatctacttggagtcttctatccaatgcccttgcgggatatgattgtatcattcctcccttcttctcatt

SEQ ID NO: 18717 - DNA, 488 bp, Glycine max
  unsure at all n locations
tgccncaagatgaaggtttcttgtggacgagggcatgcttgtattgttcgatcatgcgattcanaacttccgtttgtccatctgtttgtggatgataagctgagctcatccgcaatttcatgtcgctcatctgaaacaggtcttgccagaaaattgcttatgaataatgggtctctgtcggagatcaagctgcgtggcatgccatgaagctttctgacgatgtccatgaacaggatgacgactgagtaagctgagtgctgagttggcagcatgcctaggtgtatgccttttgaaaatcgatctactacaaccaatatggcagtatttctgtgaatcggaggtaggcctgtgatgaggtctaagggaaagtcctcccatggccgacagggtaccgataatggacataagagaccggcagacttcttagtctcatacttagtgtgttggcagtcgacacaggttgctacaaaacattntacatcttttct

SEQ ID NO: 18718 - DNA, 473 bp, Glycine max
  unsure at all n locations
tcactcgacccggatccttaagtcacctgcngcatgcagcttattttgccatctatggtcttaaacatgcncctagagcctggtttgataaactcaaggtgcacttctgaagtttgaatgtaagtccagcaagtgtgatccctctttatttgtctactccaaagggtcctcaacaacctatatgcttgtttatgtagatgatatcatcataacagggaataatccttccttaatcaagcaactcatctctaagctaaatactttnttctttcttaaagatcttggttctctagactatttcttgngaattgaggtaaaacatcaatctgatggatctattgttctcactcaaggaaaatacattagagacttgctggcctanactaatatgacagaagcaaaacctatntcttcacctatggttactggatgtaagctaactaanagtggatctgatccactcactgatccat

SEQ ID NO: 18719 - DNA, 428 bp, Glycine max
  unsure at all n locations
tcattcttatattctancataatccaatatccagaagactttgatagggaagttagaatcctagggaaagcaaggcacccaaatctaattgcattgaaaggatactattggactcctcaattacagcttttagtgaccgagtttgccccaaatggtagcttgcaagccaagctacatgaaaggcttccttcaagtcctcctctttcttgggctataaggttcaaaatcttgcttggaacagcaaaggggcttgctcatttgcaccactctntccgtccgccgatcatccactacaacataaagccaagtaacattntgcttgacgaaaattacaatgccaagatctcggatttcgggttggctcggcttctgacaaagctggacaggcatgtgatgagcaacaggtttcagagtgcattangatatgt

SEQ ID NO: 18720 - DNA, 342 bp, Glycine max
  unsure at all n locations
gcatccattatccatagngagaacacagatgtgtagactaggatggttgctggttgaaccaaacaaatactgtgctaaggactgcagaaacaactatctgttcttattaggttaatatctgatatgtgaaccattggttcacacgatactaaattaatgttttgaggggaggatccactacagtagcttgctaagttgctactgaagcccttatgtgttgctcatgcgttgcactactacatgggcttggacacccgactaaaccagtttctaagtttttatttggagcatgatgctagcaacatacgactattatagttaaattacagaattatttcatta

SEQ ID NO: 18721 - DNA, 468 bp, Glycine max
gggtcaggaagcacaacttcagtcaagcatttcaagtattatggatccttatgctataggcatgttcttgataagaggagaaagaagttggatgacaagagtgagccaatgatttttgttggatacaactctactggttcatacaaactatacaatccaaagaatcaacaagttctatttagtagagatgtctactttgatgaattaagctcatggggagagtttcaacctacttctgagacaatacagaagattcatcttgaattgaaaaatgatgatccagtaggagagatacatcaagaagtggtcaataacgaaccttagatggtggttgatagacctacaagagccaaaagttttcccttaagactcagagattatcaggtttaccctgatagtgcaattactgaggatggtgatttggtcagcatatggcacttatggcagacatggaacctattacttttg

SEQ ID NO: 18722 - DNA, 475 bp, Glycine max
  unsure at all n locations
tgtctcggaaatattggttctaatatggtactaattgtttatttatgggcttgtacagatccaaaaaatttgtttagtggagacaataatttttttatcaatggcaataaaaacaccacaacaactatcatttatatagatagatagataaatatatacccaaatattgttattgatccataataaatttttcttcatttttgttccctgatatttgacatggttttttaaattgtagtcattagttaagtgatgacatgtcactactaaaaaatagggtttcaacattggttattaaggactttccacatcggttattaaccgatgatgaaagtaccaacgttgaaagtaatatcgttaacatcgattntccaaaaccgatattaatataaaattacaacatcggttattgaaataactgatgttatataataagaattataaaanaaagtaatatatcttcatatcaacatcg

SEQ ID NO: 18723 - DNA, 474 bp, Glycine max
  unsure at all n locations
tgtggtggtcattctctacgccattntcatcgctgtcgtatgtaaaatgacggtcaaggctcttaagacagcaatgtaaagatgtacggtatgataatagcaaggcaaattgaaatagaatatgtatattgttatttcattgatcctttgcatgatatatataatacatgtacaagaatgttctataccaattctaaggcatgacagacgtgatccataatcagtggcatctgatttattctatgcattataaggtaaataaatatagaatcaaggtaacataggaaagtaaatatatacacagcatatttgcaatcatgtagaagatatttcctaatactcccnctcaagttggtgagtgaatatcgtgaagtcccaacttgttgcgcaatgtcacaaattgatcttttcccanagcttttgtaaacacatctgctagctagaaattttgtggcacataagaaggattgatca

SEQ ID NO: 18724 - DNA, 462 bp, Glycine max
tacattctcccactttctcaagcaaattcttaattcttcttgatatcatcaaaatcttcatgatttacaaatatgttttataacagctactaatatttgaattcgatattctagactgtgtaatcgattacacaattttggtaatcgattaccagcagttaataaacgttttaattcaaattttaaaagctgtaatcgattacacaattcctgtaatcgattactagacaggattttcagaaaaatatttctaagagtcacaacttttcaaaggctttattcatgactaccaatgatctatatatatgtgacttataacacgaaattgctcagaagttttcagaacaacaagtgtttatcctctcaaagagcaaaatcattttatcctcttaagaattccttggccaattcaatcgcaattcattaatgaattatttgagtgctcaatctgtaaaatctatc

SEQ ID NO: 18725 - DNA, 456 bp, Glycine max
  unsure at all n locations
tactaaggcacctgttctagctcagtatgacttttctaaaacttttgagctagaatgtgatgcctctggagtgggagatggagctgtattgttacaaggtgggcaccctatagcttattttagtgaaaaacttcatagtgccaccctcaactaccccacctatgataaagagctttatgccttaataagagccctccaaactagggaacattaccttgtttccaaggaatttgtcattcatagtgatcatcaatcacttaagtacattagagggcaaagcaagttaaactagaggcatgcataatgggtagagtacctagagcaatntccatatgttatcaaatacaaaaagggaataacaaatgtggtagctgatgccctctctangagacacacattgttttgctccctacgagctcaaaatttaggatttgataatattanggacttgtatgc

SEQ ID NO: 18726 - DNA, 420 bp, Glycine max
  unsure at all n locations
agctntatgcttgtcaattttcaggaggcatctcggagaggatctttttcggacatatttgcgcaaaatctcttgaactangaagatgttgcccatcatctttttgttcttaatgaaagcagtttgagtgtccctaataatagtctcaagcactggggctatgtggttagccagaattttagatacaatcttgtataacaaattacagcaagatattggtctaaaatggttaacctgcgaggcctgatcatgcttaggaataagcgcaataatagcatggttgagctgctttagaatttttccagttgtaaagaattcattaaccgctgcagagatataatcaccaatgatatctcaagccttcttgaagaataaaacattgaaaccatctggcctaggagcgttattgtatccatcaca

SEQ ID NO: 18727 - DNA, 451 bp, Glycine max
agctttaagccaattcatacgacaataactgtttactcggatgtctgattgagtcccgtattataacgaaacgctcgaaattgaatgttgaagctttgagccaattctaacgataataactttttactcggatgtccgattgagtctcgtaatatatcgacacgctcgaaattgaatgttgaagctctaggcctattcaaacaacaataacgttttactcggatgtccgattcagtgacgtaatatatcgggacgctcgaaattgaatgttgaacctctgagccaactcaaacgacaataactttatactcggatgtctgattgagtcccgtattatatcgagacgctcgaaattgaatgttgaacctctgagccaattcaaacgacaataactttgtactcggatgtctgattgagtcccataatatatcgagacgctcgaaattgaatg

SEQ ID NO: 18728 - DNA, 360 bp, Glycine max
tagagaagctagagcttagctacacatacctctctaatagctaagctcacctccttgagatgagaagctagagcttatctacacaccccctatcatagctaagctcacgcgcatgacaaaaaagacatgaaaataacataagaagtgcttattacatagacaactcaaaatgcctcgaaatacatggctaaaaccctatactactagaatggcaaaatataaggcctagacaaattatgaacatattctagtatgtacaaagataagcgggctcatacttagcccatgggctcgatatctaccctaacgctcatgagaaccctatggcctttgcttggatctgtagcccaatctacttgg

SEQ ID NO: 18729 - DNA, 346 bp, Glycine max
agctttgagcttttcaaatggtcataaatagtaactcggaggtccgattcaggcgcatattttatcgtgacgctcgaaattgaacaacggaagctctcaagaatatcattggtcataacttttaactcagaggtccgattcaagcgcataatatatcgagacgctcgaaattgaacaacggaagctctcaagaaatttaaatagtcataacttttaactcggaggtccgattcaggcgcataatatatcgagacactctaaattgaacatcagacgctctagagagaatcaaatggtcataacttttaactcggaggtccgcatcaagcgcataatatatcgatac

SEQ ID NO: 18730 - DNA, 457 bp, Glycine max
  unsure at all n locations
tgtanggttaaagtctcacgaatgtcatgtgctcatgcaacaattgttagccgtggctatacgagatatcttgccaaacaaagtctggttagcgataactcgcctgtgctttttcttccatgctatatgtatcaaagtcattgatccagtcaagtttgatgagttggaaaatgaggccgcaattatactgtgccagttggagatgtattttccccccgctttctttgacatcatgattcacttgattgtgcatctggtcagagaaatcaaatgttgtggtcctgtatatctacggtggatgtacccgggtgagcgatacatgaagatcttaatagggtatacgaagaatctatatcgtccagaagcatctattgttgagaggtacattgcagaagaagccattgaattttgttcagaatacttagagaaagctaaacctgttgggctatctgagtct

SEQ ID NO: 18731 - DNA, 384 bp, Glycine max
ctctctacatatcatgcgccgcactcggacatgcctgtgaaaagatatgttcataccaattgctcgagagcttacgatgcttaatttcgagcgtatcgatatattatatgcctgacccggacctcacagcgaaaagttatgaccataccaatttcacgagagcttacgttgtgcagttccgagcgtatctatatgagatgcgccgcactcgaacatcccagtgaaatgatatgaccatgtgaatttctcaagagcttacgttgcgcaatttcgagcctatcgacatgttatgcgcccgaactggacatcccagtgaagagatatgaccatacgaatttcacgagagcttacgatgtgatattcgagcctatcgacatattatgc

SEQ ID NO: 18732 - DNA, 444 bp, Glycine max
  unsure at all n locations
ntataagctntatttaagccatatctctagtcaatgtgggactaaattaccacccttgagctgcaattaaggcagcccccatagcaaccgcaactgagcttggataggggtgaccacaattaagcttggctttccaacaattaggcaattccctaactcttcttaccattttctccactctttcaccccctttttcctcctcttctctacacaccaacagacttttactactgttaggaccatttttatctttctttcctctcccatgtatcttgatcagcagcccatcagaactcaattaaattaaaatacaactcangcagaacaaaaaatctgaatattatttggacagtgaggtctctcccaagtttgtctatgtttgactgctgaacttatggagattaacataaatgatctggtacagttgcgagggacacacaaagc

SEQ ID NO: 18733 - DNA, 416 bp, Glycine max
agcttgaaggctaactggatgcattggtcaacttggtaacccagctggccttgaatcagaaatctgtacctgtcgcaagggtttgtggttagtgctcctctgctgaccaccatacagacctttgcccttccatgcagcaacctggagcaattgagcagcctgaagcttatgctgcaaatatttacaatagacctcctcaacctcagcagcaaaatcaaccacagcaaagcaattatgacctctccagcaacagatacaaccctagatggaggaatcaccctaacctcagatggtccagccctcagcaacaacaacagcagcctgctccttccttccataatgctgctggcccaagcagaccatacattccttcaccaatccaacaacagcaacaacctcagatacagccaacagtt

SEQ ID NO: 18734 - DNA, 468 bp, Glycine max
  unsure at all n locations
atgccgtggagtttgacacaatgtcaatgaacaacatatgtaccatgtgagctgtatgagcctgaggtataatgccgaagtgaatcccctttganaagcggtcaacaaccacaaggagtacaatcttgccctgaaaaaaaggaagaccaatgacgaaatcaagggagaggtcctcccatggtctgaatggaactggaagagggcacaacaagcccacaatatgtttcgtttcatatttcgtgaattgacattcaatacaattagctacaaagttggcgacatcagctcggagacctggccaagttaaattctccgacaaccatgttattgtctttgtgactccaatatgaccccccatgggagtggcatggtattcgatcaagagagattgaatgagtggaagatcatggtgtaaccatattctgcccttctggagaatgagattcntaataatggtgaagtctggat

SEQ ID NO: 18735 - DNA, 428 bp, Glycine max
  unsure at all n locations
agcttattcagatgtacttttatgataaaaacataagaagaaaaaatgacataaatttcttcataagtttaaaaatagttcacgcataagttagtttatagaagctatcttatatagcttctctaaaagatgatagagtttctacaaattgatatgtacataaattaatttgagcttatggagaaattcatctcattatatttctttttatctttttctcctaacagttcttctagaaaaattcatccaaacacgtctcattntaacagttaacataaaccatcaagattatatatactttatcctctaaattattttttactttgaaggagtcaagataaaagtcattataatgcatgtgtaaagaanatactacaactcatgcaagtgcatatatcgatatgtttagtatatgaaaattacgaatc

SEQ ID NO: 18736 - DNA, 475 bp, Glycine max
  unsure at all n locations
ntcttgagataacttccttgagaatcttctttgagataacttccttgagaagctagagcttagctacacacaccctctcataactaagctcacctccttgagaagcttgcttaagaagattcttaaagaatctagagcttagctacacacacctctctaatagctaagctcacctccttgagatgagaagctagagcttagctacacaccccttataatagctaagctcacccctatgccaaaaaatatgaaaatacaaaaaaagtccttactacaaagactactctaaatgccccaaaatacaaggctaaaaccctatactactagaatgaccataatacaaggcccanacgaagganaaacctattctaatatttacaaagataagcggactcatacttagcccatgggctcgaaatctaccctaaggctcatgagaaccctanggccttcccttggatctctggcacaatct

SEQ ID NO: 18737 - DNA, 423 bp, Glycine max
agctttgaccaaattcaaacgatgataactttttactcggatgtctgattgagtcccgtaatatatcgagacgctcgaaattgaatgttgaagctctgaccaaattcaaacgatgataactttttactcggatgtctgattgagtcccgtaatatatcgagacgctcgaaattgaatgttgaagctctcagcaaattcaaacgataataaatttttactcggatgtctgattaagtcccgtaatacatcgagacgctcgaaattgaatgttgaagctctcagcaaattcaaacgacaataatttttttagtcagatgtctgattgagacccgtaatatatcgagacgatcgaaattgaattctgaagctctgagctaattcaaacgacaataacgctttgctcggatgtctgattgagtcctg

SEQ ID NO: 18738 - DNA, 341 bp, Glycine max
  unsure at all n locations
agcttcacgattttcctagcaatttagtttcagacagggatcccatttttgtacgacttttttggcgcaaattgttcaccatgtgtggcataaagctatgtatgagcacttcacatcacccagaaatgaaccagcaaaccaaagttctgaaccatactttagagcaatatctcaaatgcttggtcagtgacacaccaactcgctggttcaactatctctcactggcagaatggcgttataatacatccattcattctgctacaagaattactcnctttgaagcaacttacggcaaggtcccttcttctattctcggtacttgatgggatcgtccagcgtat

SEQ ID NO: 18739 - DNA, 407 bp, Glycine max
agcttctgttttcaattttgagcgtctagatatattacgggtatcaatcggacatccgagcaaaaagttattgtcatttgaattttgtgtattcattttttagcatcaagaattattaaatgactcaatcggacatccgagtaaaaagttattgtcgtttgaatttgctgacagcttttgtattcaatttcgagagtctcgaattattaaatgactcaatcggacatccgagtaaaaagatattgtcatttgaattttcttagagcttttgatttcaatttcgagcatctagaattattaaaggactcaatcggacatccgagtaaatagttatggtcatttgaatttgcttagagttactggtctcaatttcgtgcgtctcgatatactataggactcaatcggac

SEQ ID NO: 18740 - DNA, 460 bp, Glycine max
  unsure at all n locations
tgtagcanatgcaaaccacaataactnttagctcggatatccgattgagtcccgtaatatatcaagacgctcgaaattgaatacagaagctcttagcaaattaaaacgacaataactttctactcggatgtctgattgggtcacgtaatgtatcgagtcactcgaaactgaatacagaagctgagagaaaattcaaacgacaatgacttttaactcggatatcccattgagtcccgtaatatatcgagacgttcgaaattgaatgtagaagctgtgagaaaattgtaacgataataactttttactcggatgttcgattgaatcccgtaatatatcaagacgcttaaaattgaacacagaagctcgtagcanactcaagcgacaataactnttaactaggatgagtcctgtaatatatcgagatgctcgaaacttataacggaagttcgtagcatattca

SEQ ID NO: 18741 - DNA, 375 bp, Glycine max
agcttgtccgttcggagttttccgactatgctcttgtgtggtggaacaagctacaaaaggagagagcatgaaatgaagagccaatggttgatacatggacggagatgaaaaagatcatgaggaagcggtatgtgccggctagttactcaagggacttgaaattcaagctccaaaaactaacccaaggcaacaagggggttgaggagtatttcaaggaaatggatgtgctcatgattcaagcaaatattgaagaagatgaggaggtaactatggctcgatttcttaatggtttgactaatgatatccgtgatattgctgagctgcacgaagttgttgatatggatgatttgcttcacaaagcaatccaagtggagc

SEQ ID NO: 18742 - DNA, 429 bp, Glycine max
agctttgccacatggagatagatgtccaaaaaatgaaaaaataaaaaataaaaaatcaactccctcttgttgtgtgtaacccttggccacaagcctagctttgtaactttggatggcgccattaacacaatgtttgatgtgataaacccacctataaccaattgaaacttagcttggggaaaatcagttagatacgaagtatgatttgcttcaagagtatgtaattcatccttcatagcttttcttaatacagtttcatacttaacagcttatgcatatgttttgggttcagaaatttttgaaatggctaaggtatatatttgagatgactaggagacaaatgatgataggacagaacagtggataaggaatataaagcagtacctgaagtagaagacaggaacctgctgagttagaagattgcatgta

SEQ ID NO: 18743 - DNA, 427 bp, Glycine max
  unsure at all n locations
gaatgacatactcttgttggacatcaacttgtgttcaaaattattagttntaaggactgacaatggcctgcagtcgttcaaagcagttcaatgagttctgcaagaaaataggcatcaaaaggcacataatagtccctcacacaccacaacaaaatggtttggcagaaagaatgaataagaccattttggaaagagtgaggtgcataacttctaatgcatgactgccaaagaccttctggggagatactgctacaccacagcatatttgataatagatgtccatcatcagccttatgtttcaagacactaatggaagcttggagcggtgaaccacctgattattcatgattaaaggcgttctgatcactggctttcgctcatgttaaacaacgaatgctggatgcaaggtgtataaagtgagtgttca

SEQ ID NO: 18744 - DNA, 417 bp, Glycine max
  unsure at all n locations
agcttcttatccaaggctcatcttggtggtgaagctccttcttccatggcttattccctagtggatgacgcctcctctcacctcttctcctttgtcttccactgcatctccatggtggaaaatcaccattaaaggacctcattgaagctcanaccaccaaaagtgagtgttttgttgggaaccttgaatgtggtcatccaaacactcttaggattcgcctagtttacatttcttgcttactttcatagcttatttcctttatcttccattgtcaaaccgcctagatagctttccttttaaccaattagttttttcccttatctntcagacctcttttagtgtttattttggctagtttcaaccatagttacttttaccttntgttttcaaacctccaataagaaagaaccacaactt

SEQ ID NO: 18745 - DNA, 463 bp, Glycine max
  unsure at all n locations
ttnntgaaagacaaatctcttcaaaccattntaaaaaggcacaaatggcaatttgaaaaggcatgaagggtctatatatatgtgtgtctaactttgaaaagcaagaaagagatattctaagagaacttcattgccaaatgttctctcaacaactcttgggcaaacacttacaaatctattgagagttcatccaggaatttcaatttgtatcatccactctaaaggagagaaatctttttgtttatctcanaagtcagttgtaatcaagagactggttgtctcttgaattgtgagtatcctgaacacaagagaaagggattcctcgggtgttcagaagttgtaaaaaggatttttacaaagttagtgaaaatctcaagtgggttgcttgaggattagatgtangcacaggaagtggctgaaccagtataaatcgagtntgcatttctctcttccttcatctcat

SEQ ID NO: 18746 - DNA, 454 bp, Glycine max
  unsure at all n locations
tccatggcatgaggtctggctcccgctctgctcttgcccgcgatgccttctccctttctttatccacatgctctctctccctcaatgaattaaggcaacccctctcccttccttcatccaagatgcttgtcgagctctccaagtcccaggactcccctgccggcgacagcaccaccaccgtcatcgtcatcatcggcgccctcctcaagcagtgcctncaccttctctcccacgacatccaccccaccatcgtcactgacgccctccacaaggctgccatcaaggctgtcgatgttctcattgccatggctgtcctcgtcaagctctccaaccgtgactccctcgtgaagtccactcanatntaatggataggggtaatatgaatangtaacccaattgaaataagaaactacccaattanatccaatgaactactacnaatatgcatcaacat

SEQ ID NO: 18747 - DNA, 367 bp, Glycine max
  unsure at all n locations
agctnttttcagtcgtctgtaaggatgattgggtgttagaaagtggtgatgcctactgtacacagtttttctcccatgtttaagttgtttgtaacttgtattttcttcacagatggggcatgcatgatgacccttaacactgtaaccgctgagattcccatatgctggaaagtcattaatggtacaaaaaagcattgcacgcatttcaaaggtctccttgcgaaacgcatcanacactacaacccccttgtcccacaactttctcagatcttcaaccaacggacttagataaacatcaatgtcatttcctggctgtcttgggcccgatatcatcatattcagcgtcatgtgttttcgcttcatgcac

SEQ ID NO: 18748 - DNA, 446 bp, Glycine max
  unsure at all n locations
nttaatggaagtcaagagcacgatattgcgcccataccgttgactggtgagcaggtatatcagcgggttcaacacctgaatactgtatttggaaagacccaaaagaaggataaaagtaagagttgcatatggaaaaagaggtccattttctttgatcttctgtactagtctgatctagatgttagacattgtattgatgttatgcatgtcgagaaaaatgtatgtgacagtgtgattggcacgctccttaacattcaaggcaagatgaaggatggcttgaatacccgtcaagatctagctaatacagggatacaatcatagttgcatccaaggtctgatgggaagaaaatttacttgcccccagcttgccatactttgtccaaaaaggagaagatcccgttttgtcagtttcttcgtcgggtgaaggttccacaaggatactcttc

SEQ ID NO: 18749 - DNA, 461 bp, Glycine max
  unsure at all n locations
tcaggttgctcattgactccagattgatgcataanaggacaaagatctgtatggtgatctacagaagaacatagaccacagactctttcaacaggtgtagattttttattcatggcaagctgagttactaggttgaccaaggcatcaagttttccctcaagctttttactaggttgaccaagccatcaacttttccctcaagctttttattttcacttgaatttgaaattgaattttggagacaaattttcactaattatgattagtgaattttagctatggttcagcccaccaatccaagatcaattccaagattctccactaagtgtgcttaggtgtcatgaggcatgtaaagcatgaaggacatgcacaaagtgtgactatatgatgtggcaatggngtgtagcaagcaaatgatcacctccccctctaatantttaatggattggtcttctcccaat

SEQ ID NO: 18750 - DNA, 330 bp, Glycine max
agcttctactataatgtaaaggtgaaattatgtataagttgggtgtcataagttgaactaaatacattgatctaaacataagtgaaaagcttaaggctctatctagctaaaaaaagacagacaaaataatgaactcgttccattaactaaaattcaattacgagataaagcatagatacgaaagattattacatagattatgtacttggctaaacttaaaggagtgttgttcgccggcgagctggaggttgccgctgacgaagacgatcatggcggagttgacagcggacggctgggaatcgacggtggtgatggagtgctggcactgtt

SEQ ID NO: 18751 - DNA, 403 bp, Glycine max
  unsure at all n locations
agctntcattgttcaatttcgagcatctggatatattatgcgcctgaatcggaccttcgagttgaaagttatgaccatntgaatttcacgagagcttccgtggttcaattttcagcgtatcgatatattatgcacctgaatcggacctccgagtgaaaagttatgaccatttgaatttctcgagagctttcgttgttcaatatcgagcgtctcgatatagtatgcgccggaatcggacctctgagtganaagtaatgaccatttgtattgctcaaaagctttcattgttcaatttcgagcgtcttgatatattacgcgcctgaatcggacctcctagttgaaagatatgaccatttgaatttctcgagaagcttcgttggtcaatatcgagcgtctcgatata

SEQ ID NO: 18752 - DNA, 443 bp, Glycine max
  unsure at all n locations
tctaaactntgtacaagaatgaagctctgataccacttgttagacaagtggcctcagatatcttaagaaggggggggttgaattaagatattcgaaactntntcttctaattaaaaatctatcttactttgtacttaagttatgaattcccttaaagacaatcttcttaaatattaattcaaatgaagcaacttgaatatgaatataaagcaataataaataaaggagattaagggaagagaaaatgcaaactcagttttatactggttcggccacacccttgtgcctacgtccagtccccaagcaacccgcttgagagttccactaacttgtaaattccttttacaagttctaaacacacaaggacaacccttcctttgtgtttagagattctttacaacaagagactcacagtctcttaatcccttagagaatgagaagaa

SEQ ID NO: 18753 - DNA, 306 bp, Glycine max
acagactcgcagcagctgaatcattcctctatagcatccttaaagctgctccctcagctttaagcgcttgaatgccatgctatacaggctgaactatgactcacagattcaagaaatcaatgaatctctgctgaccattgaactgtgagtgaacgagcttaaaagcaaatgacctcttgtgaagcttctagaagcaatgcttaatgcaggaaatcgaatgaatgcacgaactgcaagaggcaaagctcaagcttttttcaatgtggcttctctaaggaagctctctgatgtcaagaccaccaacgg

SEQ ID NO: 18754 - DNA, 421 bp, Glycine max
  unsure at all n locations
agcttgtagcatattcgaacgacaataacatttcactcggaagtccgattgagtcccgtaatatatcgagacgctcgaactttacaaccgaagctcgtagcaaatatgaacgacaatgacatttcactcggaagtcctattgagtcctgtaatatatcgagacgctcgaaatttanaatcgaagctcgtagaatatacgaacaacaataacttttcactcagaagtccgattgagtcccgtaatatatcgagacactcaataattanaacccaagctctcagatacttctaacgacaataactnttcactcggaagtnctattgagtcccgtaatatatcgagacgctcgaaatgtanaaccgaagcccgtagcacattcgaacgacaataacattccactcggaagtctgattgagtccc

SEQ ID NO: 18755 - DNA, 444 bp, Glycine max
  unsure at all n locations
cttcggtttaanattcgagcgtctcgatatattacgggactcaaccggacttccgaacgaaatgttattgtcgttataatttgcagagagcttcggttttaaatttcgagcgtctcgatatattacgggactcaatcggacttccgagggaaaagttattgtcgttagaattatctgagagcttgggttttaaattttgagtgtctcgatatattacgggactcaataggacttccgagtgaaatgttattgtcgttcgaatntgctacgagcttcggtttaaaaatccgagcgtcacgatatattacgggactcaatcagacttccgagtgaaatgttattgtcgttcgaatntgctacgagcttcgggtttaaatatcgagcgtctcgatatattacgggactcaatcggacttccgagtgaaatgttattgtcgttcgaat

SEQ ID NO: 18756 - DNA, 309 bp, Glycine max
atcttcaacattcaatttcgtgcgtctcgatatgttacgggactcaatcacacatccgagtaaaaagttatggccgtaagtatcggctcagagcttctactatcaatttctagcgtctcgatctgttacgggactcaatcatacatccgagtaaaaagttatggtcgtttgcattggctgagagcttcaactttcaatatcaagcgtctcgatatgttacgggactcaatcagacatccgagtaacaagtatggccgttcgtattggctcacagcttcaactttcaatttcaagcgtctcgatatgtta

SEQ ID NO: 18757 - DNA, 465 bp, Glycine max
tcgcgatatatcttgcgccttaatcggactttcatttgataagttatgaccatatgaatgtctcgagagctttcgttgttcattttcaagcttctcgatatagtatgcgcctgaatcggacttgcacttgaaaagatatgaccatttgaacttctcgagagcttgcgttgctcaatatcgagcgtcttaatatattatgcgcctgaatcggactttcgtgtgtcaagtcatgactatttgaatttcttgagagcttgtcgtgttcaatatcgagcgtctcggtatattatgcgctggaattggactgtcatatgacaagatttgaccatttgaatatctcgagagcttccgtgaccgttccaggtttaaataagaagaatcaccggacgacgccgatcgaacattgtctagtagacatcgtccaaatattatcggcggattgaatatataaaacaataccggaca

SEQ ID NO: 18758 - DNA, 470 bp, Glycine max
gcttgtgatatttatactatatatgtgtgtgtcttcgtttatctctacctgtttaaaaatgtgttaattcactcctcatgtgttgtttatgtttggatcatgtgatgatcttaaaccttgcgtttgtgagagcaaatgactaggtgaattactttaagaaaccttgtgatgaaggactccgagacacaatattttgataggatgtaacattggaacaagagtttctattttaattgcatgatgtatcaaacatgtcattttactctatttgataaacttgaacagtcttgttttaagtcataaatatttctaagacattttatttggtaacagtgaagcgaatgtgaacattatccacgtgaacttatttacgatcttattgaataaaattgatttaattagattccgcattgtatatatgtttctttcatatatatgtatgttggagtacaatgtgtgagagacatctt

SEQ ID NO: 18759 - DNA, 352 bp, Glycine max
  unsure at all n locations
agcttgaagaagttttgatctgcacattaaaggtgtacattcaatctaattttgatttctttgtaaaagtttaatcttggctagggttaccaatggattttgagttgatagggtttcaactcttggattttctctttgatgcaatcctccctatgaagggaccagttactagatccatgagccagaggcttcaagaggattgggctagagttgctaaagaaggccctatggttctcatgaacctcaaggtagatttctgagcccatgggtcaaggttgggtccaattatctttgtacatattagattangatgtcattatatttggtccttgtatttacgactccataatat

SEQ ID NO: 18760 - DNA, 418 bp, Glycine max
  unsure at all n locations
agcttcatcaatgaaacaaggaaccctttccgtcacggagtacttcacaaagcttcgtatcatatgggatgaaattgagaacttcagacctgaccccacttgttcttgcaccatcaagtgtacatgctcagtcctcaccatcattgcccaacggaaattagaagaccgagccatgcaattcctatgaggattaaacgagcagtacaacaatgtgagatctcacgtgttgctcatggaacccatgcccaccataccaaagaccttctcctgtgtagcccaacaagaacgtcagctatcaattccttttcaaatctcaatcttgaatcanaagaaaacgtttccattaatgccgtcaagaatacttgtgaattctgcggacgaaatggtcacaccgaaagcgttggtacaagaaacatgg

SEQ ID NO: 18761 - DNA, 445 bp, Glycine max
  unsure at all n locations
ttccaaanagagttactagagacatgttagtaagatctcttgattatgcaattgttgttacttttggttgccattgcctgcttaaacatctaaacactctgttaatgagatcttcaataggaaatatttttcccagtgatgcaagatgattaactatattagtaaatctcttttgcatatcttgtatggtctcatattgattcattctaaacagttcatattcatgtgtgagagtgtttattctagatctcttaacatcagttgtgccttcatgggttacttgtaatgtatcccatatttcttttgcatttttacaatttgagactccaaaatacttatccattcttctctaagtttttctatcagtgcatatcccactaccattgcaggaatgaagggaccaatgtcaatggtttcccatatatntaaatctatggcttctata

SEQ ID NO: 18762 - DNA, 432 bp, Glycine max
  unsure at all n locations
ntagcagattcaaatctcccagtgagtgcattcacatctctgtcagaatcactntcttgttcactctctgtatcatcagaccgacttacaganagtcctttcctctgcttcttgagatgagtgggacattcagctttgatgtgtccaaagccttcacacccacggcattgaattcctttgctgtgactgggcttttcatctgaccttttctggtattcactgcctttcctgatgtcgaaagggatgttccggacatgtggtttctgccttctgtccattctgttcatcactttgttgaactgctntccaaggagcacaactgcattagtcagaccttcatcagtttccaggtcatactcatcttcttctccttcatcattggacacgaaagccaaattcttgctcttcttttcagccctatccgagagtcct

SEQ ID NO: 18763 - DNA, 449 bp, Glycine max
  unsure at all n locations
ttttcattatatattagcatttcatttgcctccttacatttgatgcatcattggtgtcttctagcagtgatgatatgatttttataagataaccaaatgtttacttcttccaaaattgaggtgtttgtttgggttgtagaaatcttcatatttgatgttatgcttttaccctttatttcaatgttgattgttctttcattgcctcaccagacaagatctaagaggttcttggaaattcaacaattgagggagcataataaagagtatgacatgaagacaacaatatatttggttaaagaaacaactaaaaccaagtttgtagaaatagtagacgcccatttctgcctcaacattgaccctaaatataacgatcaacaattaagagcaacagtgagtctcctgctacttgcttgattatggtatatgcagttacattgaanacgtgaggt

SEQ ID NO: 18764 - DNA, 445 bp, Glycine max
  unsure at all n locations
tgctgccacggagttntccgactatgctcttgtgtggtggaacatgctacaaaaggagagagcaagaaatgaagagccaatggttgatacatggacggagatgaaaaagatcatgaggaagcggtatgtgccggctagttactcaagggacttgaaattcaagctccaaaaactaacccaaggcaacaagggggttgaggagtatttcaaggaaatggatgtgctcatgattcaagcaaatattgaagaagatgaggaggtaactatggctcgatttcttaatggtttgactaatgatatccgtgatatcgttgagctgcaggagtttgttgaaatggatgatttgcttcacatagcaatccaagtggagcaacaattaataaggaagggagtagtggctaagaggagttntaccaactttggttcttctagttggaaagacaaa

SEQ ID NO: 18765 - DNA, 374 bp, Glycine max
  unsure at all n locations
atgaaacaacgagatgatgcgctccatgagaggctggatcaaatggagaatagagatcatactgaagaagaaaggatgagaagagggaatgactgggttcctagaacaaatccgaattgatggtattaanactcaacatttcctgcatataaaggaaagaatgatcccgatgcctacttggagagggagatgaaaatagagcatgttttctcatgcaacaactatgaggaggaccataaggtgaagcttgccgccacggagttttcgactatgctcttgcgtggtggaacaagctacaaaaggagagagcaagatatgaagagcccatggttgatacatggactgagatgataaagatcatgatgaagcggtat

SEQ ID NO: 18766 - DNA, 412 bp, Glycine max
agctttgtgaagctcctgttttagctttacccgattttactcaaccatttgaagttgaatgtgatgctagtggagttggcattggggctgttttgatacaaaacaaaaggcctatagcttatttctcggagaaattgggaggagccagattgaactattgcacctatgacaaagagttctatgccattgtgagagctcttgatcattggaatcattatttgcgttctaatcactttatattgcattcagatcatgagtcattgaagtatatcaatgggcagcagaagttgagtccaaggcatgctaaatgggttgaatttcttcaatcttttaatttctcttcaaaatacaaggatggtaagagtaatgtggtggctgatgcactttcaaggaggtatgctttaatttcaat

SEQ ID NO: 18767 - DNA, 417 bp, Glycine max
agcttgaaaaattgatagagttttattcttagatttaataggaaatatccaagtgtacctggaaaaggcatcaataaaggatacacagtatttatgaccagcataggaagtcaaaggtccccacaaatctgtgaagataagctccaaaggagagtaaacagaaatagaagtgtgaggtggtaatctatgagatttttccatcagcaggaagaacaaaaatcagaaaatattttagtagttgtgggaaatattacaatgattgaagactagcttcattacatgactattaggatgagctaacctagcatgccagagactagcaatactaggagaagaaacaacagaattggaaaccacagtagagttttcattaaccgtagcagctgtaatagacaagccagtatctgaaattgagta

SEQ ID NO: 18768 - DNA, 359 bp, Glycine max
ttaacttcttggaatgtgcatgtggcgatggataaaggcataatccaagttaccttaaccaatccagatggaacttgcactgggatacgatataatggcggtgacagtctgcttgaagttctcaacaaggaaactaatagagggtatgtgcccctagcgatgagtatctgtgaattgtatctctctcacacgtgtgccgctgtgccgagctcagtgccagagaaccattttctgaaatgtaatggtaatgaacaggaagtatcagaattcagctgacagagtaacattgacacaggaatgggcgccagaccaaggatgttgatgtgatgcaatactgttttttgtaccgatggtgcttg

SEQ ID NO: 18769 - DNA, 305 bp, Glycine max
  unsure at all n locations
agcttatagtctttacttattgagaacaataagccaaagtcaatagttcctatataacgaagaattcattctgcggccttgagatgagtagtggttggagtctccatgtatcgactgatgagtctagtagcatatagaatgcctgatttgtgcacatcacatatcgcanactacccaccacactctggaaattattagcatccaccttttctgcctcattgaactgtgataacttcatcttgtactccaccgttgttcaaagtggcttgtagctatccatcttgaatttcttgagcatcttctat

SEQ ID NO: 18770 - DNA, 372 bp, Glycine max
agctttaaccttattgtctctcatagtctttagatttgggagccaatccaatccttgtgttcggactctcagccacttatgatagccgccaatgatcccattactgcttcccctaagctctctgtcctttcttcatgccgcatcccatgccttgcgaactccttggagtaccctcgcgttgtggtcactaaaatctcgtgcgatgaaaggcgtgattgatgcaagctccattggagcttgtaggcctaggatcttcttcaccaatggattcctttgcttcttggaagataaatggcagcggaatggagaaggaagagagagaggagacgccacttcaaggagaagatgagtctagaagaagctcaccaccat

SEQ ID NO: 18771 - DNA, 376 bp, Glycine max
  unsure at all n locations
atntccttgtttcctattaacacaacctgtacctgcgcaccanaaagaaatgcaagaagaggtcgtattattctcatgagccctangatagattttgggcccatgggctaagtatgagcccacttatctttgtacatattagagtaagatttcattatttttggatcttgtatttatggctccataatgtaggtagggtaccctagaaatgtaagatttttcaaccattgtattttatgacacctagactagtatttgtattatgggtagttctgtaatttcacatgcattaagtgaatatatgatgtgtgtgttgcgaaatacaattaattgaatcgngtgaagcccaatccaattaaattttatagggggagat

SEQ ID NO: 18772 - DNA, 429 bp, Glycine max
tcacacgtggttttgatacaacagcactgctgccgttgtggatcttgtattcactcataaaggacattagcgcgagtgtcatttactcaacctctgcatccaacatctggaacgatcttgagaaacatttcaacatcaagaacggacccagaatcttccaattgcggaaagcattactcaattgtgttcaaggaacgaactccatcaatatctacttcacgcgattcaaagggctttgggctgagctgggtgaactcaaggccaatcacagttgtaattatggcggggttgctccacttcttgcttccatcaaagaggaatttgtcatgtcatttctaatgggtgtcaacgagagttttgcccatgctagaggtcaaatcttgttgatgaaaccgattccggatattgatgagaccttctcattattgc

SEQ ID NO: 18773 - DNA, 382 bp, Glycine max
  unsure at all n locations
ttcttaagaagattcctaaagatgctagagcttagctacacatatctctctaatagctaagctcacctccttgagatgagaagctagaacttagctacacaccccctataatagctaagctcacccncatgacaaaaaacatgaaaataccaaaaaaaagtccttactacaaagactactcaaaatgccccgaaatacaagggctaaaccctatactactagatggcaaaatacaaggcccaaacgaaggaaaaacctattctaatatttacaaagataagcgggcttatacttggcccatgggctcganatctaccctaaggctcatgagaaccctanggccttcctttggatctctagcccaatctacttggagtcttct

SEQ ID NO: 18774 - DNA, 372 bp, Glycine max
  unsure at all n locations
agcttgttcgttttgctgatatttatcatgcacactnttctgatgatgaccgaggaacaattagggatcaacttgaaacttatgtgcttcaagtgagaagaaatgcttctttttccacttgtgaagatgttcaaagtttggctatgaagatggttcanactgagaaacatttggtatttccattggtttataaacttattgagctagctttgatattgccggtgtcgacagcatccgttgaaagagctttttcagcaatgaagattatcaagtctaaattgcgcaataagatcaacgatgtgtggttcaatgacttgatggtatgttacaccgagcgggagatattcaagtcgctggatgatattgatatta

SEQ ID NO: 18775 - DNA, 465 bp, Glycine max
  unsure at all n locations
gtcctttaatttcacaattatgttatgcccncttatagtgaccttaaactgttggacgtataagattcttatatttaccaatagttcactttgcctaataactttgcacacacgcatagaaatcagtatttccaaagtcctaaaatttgtgattgcaatattaatttttaatgctctttttcagggcaatatcagcatggtatgagaatcgtcattggtttaacactttatgcaagacagtgatggagcaagactggtcttggaatcgccctgcacttgattatctggagctttaccatgctgcacgtaagtcagcatgagatttaatagacatgaattaagtttcatcctctttgtacacattnttgtggtaagcttcagtttgaacacacttgattgcatctggtgaatccttcaaaaagataacaactacgaggtgaanagccataaaagatgatgagcttc

SEQ ID NO: 18776 - DNA, 423 bp, Glycine max
agcttctttcgattaatgaagatgataatattacatgttaataagttgacagttttaagtgtcttgatggcttgtggcacaattaagtctttgctatttggaagagaagttcatgcacagatgattaaaagtgatatccataccaacatatatgtaggaagcactctggtatggttctattgcaaatgtaaagaatactcctatgctttcaaggtgctccaatatatgcctttcacggatgttgcttcatggactgccattatctctggttgtgccaggctcgggcttgaacatgaggctctggagtctttgcaggaaatgatggaagaaggcgtgttgcctaattcctatacttactcgtcagccttgaaagctcgtgcagaactggaagctccaattcatggaaacgtaattcattcctac

SEQ ID NO: 18777 - DNA, 441 bp, Glycine max
  unsure at all n locations
aactgaaatttctttatcanaattacatatttataatacttaacagatgataagtaatattaatcatatttttttcatttgtaaaaaattaaactcacatattaaaagatttacaattttcaaatacagtgttcaattaataaagttaaacccgttaatgataattaagtgtagatagaatgatttcatatatttattctgtcaaaaagtttttattgaatataaaaattataacataaggattatgtttcaaacaactttnttctcttttaagatgttttcatacttttttactagttaaaaatgatnttattntttttatncaaacaaaattaatgaactcaagccactttttacaaacttactccgacaattttttttaattataatctatataacaataatattcattatcatataactaatattaaatatttaatt

SEQ ID NO: 18778 - DNA, 278 bp, Glycine max
tctttctcaatccaaggaagtatgcattggaattgcttgaagacagtggtttattggctactaagcctaggacaactccctttgattgcttcttgaagcttcatgaccgtgactcacccccttatgaagatgaaacagcctatatgagacttgttggcagacttttatatttaactacaaccaggcctaacattgctttcattgttcagcaacttagtcaattcatctctcagacattacaagttcatcactcagcagcaattatagtcctcaatatc

SEQ ID NO: 18779 - DNA, 307 bp, Glycine max
cacgttagttgagtcacacaatcaaatctctcacagcactcttaccaaatttacctaatatttaggtactgaacataacttacattaagcctctgctattttactattgctgttcattaaaataatttaagagaaatcatagtaaatcttaacaagtgaaaatatttatatgttatgaaccaattaagaattataatacatataatctttaagataagttttaattatagctttgatccctaattaatatttaattgttggatttaatttttgtatttaattctataataaatatttcttttacgac

SEQ ID NO: 18780 - DNA, 421 bp, Glycine max
  unsure at all n locations
tctcgatatattatgcacatgtatcggacctncgagtgacaagttatggccatttgaattnttcgagagcttccgctgctcaatttcgagcgtctcgatatattatactcctgaatcggacctccgagtgaaaaggtaagaccatttgaatctctcgagagcttacgatgttcaattttgagcgtctcgatatattatgcgcctgactcggacctccgagtggcaagttatgaacatttgaatttctcgagagcttccggtgctcaatttcgagcgtctcgatatattatactcctgaatcggacctccgagtgaaaagttatgaccatttgaatttctcgagatcttccgttgctcaatttcgagcgtctctatatgtgatgcgcctgaatcggacctccgagtcacaagttatgaccat

SEQ ID NO: 18781 - DNA, 485 bp, Glycine max
  unsure at all n locations
cactaagcttgcgtttggtaacaacttaactaacttcttattgaacaagtgtttatcatatctcatataaacgcttgtgtataagcgctttttataattgaagtggaaagaagtaaagttaaactggtttcatataagctataagttggtttcctaaactatcttgaagagcttatngaaataaacagaaaacagctaataagcatatcttaaacactggtttcataagctntctcanacactaacacaaagttcatgagagtaatatatgtccttcctacaaattctttactgcttaattcctataagctcatgtgcatgataagttcacaagggattgattaatctgtttacctaaatgtcacagggtggtcatgattagggtatntatacatcagtataatcatacctaataaataactatattataagtgggtattataattataaccataactttggttttaaatatgggtatataacta

SEQ ID NO: 18782 - DNA, 482 bp, Glycine max
  unsure at all n locations
agcttccagaattatgacctcatcaaactacttgtttcccgagggaaattctataaatagacctcccatcttttatggagtgggttaccactattggaaaacccgcatgcaaatctttatagaggcaatagatttaaatatttgggaagccatagaacaaggaccttatgttccctctatagtggccggaagtgcaacaatagaaaaacctagagcagattggactgaggaagaaagaagattagtacaatataacttaaaggccaaaaatattattacatctaccctangaatagatgaatactttagggtttcaaaattgaaaagtgctaaggatatgtgggataccctacaagtaacacatgaaggcacaacaaatgttaaaagatctaggataaacacattaactcgtgaatatgaactggttaggatgaatgtaaatgaaagtatacaagacatgcaaaagaagttcacacacatag

SEQ ID NO: 18783 - DNA, 328 bp, Glycine max
acactatagaaactcaacttgaaccctacttttgaaatgtattattcaaggaaaattcttctttgaacagcaatgaccatcaatatgatatttgtaatcttacagagcaacctgaggatctaaaaggtggttcttttgttccccatcagcttgaggcactgaactggttgcgtaaatgctggtataagtccaaaaatgtgatacttgctgatgagatggggcttggaaaaacaagatctgcttgtgcttttatttcatcattgtattttgaattcaaagtttcacttccttgctaggtcttggtaccactttctaccatgcctaattg

SEQ ID NO: 18784 - DNA, 455 bp, Glycine max
  unsure at all n locations
actaagcttaagaaatatggcctcatcaaactacttgtttcccgagggaaattttataaatagacctcccatctttaatggagtgggttaccactactgaaaaacccgcatgcaaatctttatagaggcaatagatttaaatatttgggaagccatagaacaaggaccttatgttccctctatagtggccggaagtgcaacaatagaaaaacctagagcagattggactgaggaagatagaagattagtacaatataatttaaaggccaaaaatattattacatctgccctangaatagatgaatactttanggtttcaaattgtanaagtgctaaggatatgtgggatacactacaagtaacacatgaaggcacaacagatgttaaaagatctangataaacactntaactcgtgaatatgaactgtttangatgaatgtaaatgaaagtatac

SEQ ID NO: 18785 - DNA, 408 bp, Glycine max
  unsure at all n locations
tcaagctagcatgattangattgctcaccctacaccagcagtcggggtaacctttacagaaatatgatcaccatcctgaatctctagcagtcttctacacttatcttcataaggattatgtgtactatgtgaagtttttatgctatcttgaatcaacttaatcctctcttcggtttgttgcaagaatcttggggccccacgaccatatttgcaccatcttggtaacaacaaaggggtggtctacacctcctaccatataaagtttcaaatggtgtcatgccaatgctagaatgaaagctgctgttgtacgtgaattccaccaaagggcaaacctgatcctatctacctagatgatcccacacacatgctggcaaatattgtctaatgactatatcgtcctctcggatt

SEQ ID NO: 18786 - DNA, 450 bp, Glycine max
  unsure at all n locations
tatcctataactgactaagctctattggtaatcgattgcagtcttgtgtaatcgattacatcctactgttctatggtaatcgattacagggagtggtaatcgattaccagacctaaatcaaggctttctctacaaatctaactattgcttactcctaaaaactacatactcattgtatcttttatctaccacaatcagagatcaataatagactttgaaaaacaagcattataaacatcttaactacaaccatcaagcacaatcacaagtacaaatatactcaccaaatcaataatcatcaaatcatacacaaagaanatcattaagccgcaatgtacaaccattatgattgtcaaaacacaaacaaagataatcattgacaatcattcaatcattatgaccatcaaaacacaaacacaatcataaaaaaagaanatataaattaacaat

SEQ ID NO: 18787 - DNA, 407 bp, Glycine max
  unsure at all n locations
agctntgaatgctctattcaatggtgttgacaagaatatcttcagactgatcaacacatgtacagtggccaaggatgcttgggagatcctgaaaaccactcatgaaggaacctccaaagtgaagatgtccagattgcaactattggccacaaaattcgaaaatctgaagatgaaggaggaagaatgtattcatgacttccacatgaacattcttgaaattgccaatgcttgcactgccttgggagagaggatgacagatganaagctggtgcgaaagatcctcagatccttgcctaagagatttgacatganagtcactgcaatagaggaggcccaagacatttgcaacatgagagtagatgaactcattggttcccttcaaacctttgagctangactctcggata

SEQ ID NO: 18788 - DNA, 471 bp, Glycine max
  unsure at all n locations
caatttcatgcgtctcgatatattatgcgcctgaatctgaccttcgtgtgaaatgttatgaccatttgaatttctcgagagctttcgttgttcaattttgagcgtctcgatatattatgcgcctgaatcggacctccgagttaaaagttatgaccatttgaaattcccgagagcttccgttgttcaatttcgagtgtctcgatatattatgcgccagaatcagacctccgtgtgaaaaggtatgaccatttgaatttctcgagagcttcagttgttcaatttcgagcgtctcgatatattatgcgcctgaatcggacctncgagtgaaaagttatgaccatttgaatttctcgagagcttccattgttcaatctctagcgtctcgatatattatgcgcctgaatctgacctccgtgtgaaaaagtatgaccatntgaacttctcgagagctttccgttgtcaatttcgagc

SEQ ID NO: 18789 - DNA, 433 bp, Glycine max
  unsure at all n locations
agcttgaaattgatacaacggaagttctcgagaaattcaaatggtcataacttatcacccggaagtccgattcaggcgcataatatatcgagacgcccgaaattgaacaacgaatgctatcaagaaattaaaatggtcataacttgtcacatggaagttcgattcagatgcatactatatggagacgctcgaaattgaacaacgaaagctcccgagaaattctaatggtcataacttgtcacacggaagtccgattcacgcgcatactatatcgagactatcgaaatagaacaacggaagctctcgagaaattcaaatggtcataacttatcacacggaagtccgattcaggcgcataatatatcgagacggtcgaaattgaacaacanatgctctcaagaaatagaaatggtcataacttgtcacacggaag

SEQ ID NO: 18790 - DNA, 484 bp, Glycine max
  unsure at all n locations
actaagcttctcgatatattatgcgtctgaatcggacttccgtatgataagttatgaacatttgaatttctcgagagcatccattgtttaatttcaagtttctcgatatattatgcacctgaatcagacttncgtttgaaaagttatgaccatnttaatttctcgagagcttccattgttcaatttcgagcgtctcggtatattatgcgcctgaatcagacttncgtatgaaaagttatgaccattttaatttctcgagagcttncattggttaatttcaagcttctcgatatattatgcacctgaatcagacttccgtttgaaaagttatgaccattntgaattctcgagagcttccgttggtcaatttcgagcgtcttgatatattatgcgcctgactcggacttncgtgtgataagttatgaccatttgaatntctcgagagcttccgttggtcaatttcaagcttctcgatatattatgc

SEQ ID NO: 18791 - DNA, 406 bp, Glycine max
taagcttccaattttttaagttattcctcaaaactgtcctacgcaaagttcccaaagtcctattaacaacttccgtttgcccatcggtttgtgggtgacaagtggttgaaaacaacaatttagtgcccaacttgctccacaaagtcctccaaaaatgcaaatcatcaagcctaggtataggatgcctatatttaatggtgatgttattaagggctctacaatcagaacacatgcgccatgtcccatcctttttagggaccaaaatcactgggacagcacaaggactcatactatctcttacccaacctttgctaatgagttcatccacttgtctttgaatctctttggtttcttgtgaattacttctataggctggcctattgggcaaagaagctctcggaatgag

SEQ ID NO: 18792 - DNA, 411 bp, Glycine max
ttagcttatgacttttattacaagcctttatagagaatgtgggaaacacaaattaaataaaaaatatataacgacttataaactagatgcatttatcataaaacatcgctatctaccatgttatattttatataaagagtattaaaaatgcacaattaactatttaaaccataagagtaacgtaaatcagttataaaggtgttgacaatttaaaagctgatatatatcagacgaaacctatttggtgtatgtatttgggaaatttcattcataatagttctttgctaaatgcaatcatgttagattgtaaagcaaaaggaaagaaaaacattatttataaaaatatataagagtcaagctaaaagacaagtagtgatagatacggaattttgcaatgaattacggtataac

SEQ ID NO: 18793 - DNA, 403 bp, Glycine max
agcttcaagatttatggcctcatcaaactacttgtttcccgagggaaattctataaatagaactcccatctttaatggagtgggttaccactactcgaaaactcgcatgcaaatctttatagaggcaatagatttaaatatttgggaagccatagaacaaggaccttatgttccctctataatagccggaagtgcaacgatagaaaaacctagagcagattggactgaggaagaaagaagattagtacaatataatttaaaggccaaaaatattattacatctgccttaggaatagatgaatactttagggtttcaaattgtaaaagtgctaaggatatgtgggatacactacaagtaacacatgaaggcacaacagatgttaaaagatctatgataaacacc

SEQ ID NO: 18794 - DNA, 213 bp, Glycine max
ggaatcggacctcagtgtgacaagatatgaccattttaatatccttatagcaaccgctggacattatccagtgtctctatatgtgatgcgccttaatctaacatccgtgtgaaaagttatgagcatatggatatctcaagagcttccgctgaacaatttcgagcctctcgacatattatgcgcctgaatcggacatccgtgtgagaagctatg

SEQ ID NO: 18795 - DNA, 485 bp, Glycine max
  unsure at all n locations
tgagcttcattcgcagatccctcatgtaagactacactcgatttagatagttctcttaggtttagactaagtttaactgagtttcatctgtagatccctcatgtaagactagactcagctcaagtagcttactaaagtttagcctaatttagcctaagcttcgtctgcgatggtgtagtttttaggagggggtggcttgcggtggtggcggnggacagttttgatgatgagggtgaagaagctgacgaggaaggcatagacaacgagagtgccaagtgtctagatgaagacctagcgactaacaatgatgcagcccagatatatgtaccttttcttcttctttntatgttctcctttgcccaagagccagctatgttgggtctcatccaaagcacctcggtccagctcatggagattcggtggcggagtctatggtgtgaatctcaagcaggcctccccacagatccctactgtgcatactaatt

SEQ ID NO: 18796 - DNA, 417 bp, Glycine max
agcttgtgtttttaatattccattgtatgtacaaattattgaaatatttgccatttaatttcatttcaaagcacattgcagaatttcaatgaaaagtgacttgttattacaaatagaaaagttatattttgtttaattacaattcaaaaatattattcatttttgaaaagtaattacaaatataccttttttagaagtaactcaataaaacttctcaaaataatcagaaatatattttttcaatttttttctcaaaatatcaaatgaatacattaaatattttaataataatattttctttttcaaatgaaaaataacttttcataaaatataaattaaacagacggacttgtaattagagatattgtccgcctttagtttaagcttcagagtcattaatttatgttcattatgttc

SEQ ID NO: 18797 - DNA, 315 bp, Glycine max
ccattgctaccaccaactttaggttctacgacttcaagcttaagaagaattgggtcagctatcactttggtcaagacatcattgacagaatcaaagtaatgatcacctttcacaaggtttgttcttgaaaactttttaacacccaggaaaagaaaggccactaaatttttggagctcagagaaccttgattctttagtttctccgagttctaaccttttgccaataagcgaggccaaacagcttcctagaagatatcattacttttggctttgcacaaattggtatcccccagtcaaatgcttgattatatcact

SEQ ID NO: 18798 - DNA, 298 bp, Glycine max
  unsure at all n locations
tggctggagaaactgataacattatgcttactggtgaaagcttgagatatagtactgatcaattgtactcccagaagagactcataaaggtctcccttaaggcgcttggttctgcaacatacgcgcctgcaaactctaccagatctcaacattctcaagacagttcattacctgtaactctaagattgattnttcagaatgtagataagtttggaggtgacatttattattcagctggtactggtatgagcgatataatccacanagatccaacctgtttttctgctctgcatgaaat

SEQ ID NO: 18799 - DNA, 444 bp, Glycine max
  unsure at all n locations
ttgatgctctagttngatatctatcanagacattaaaaaattatttataattggttcacanacaaaatgcaaggctgctactaggtggattggtgttaaagtaagtcatttaaacaatgcttctaatttgtattttattattgtgtagactaatttgtacttaacattgaatatccaaatttcataatgtatctagtgtaatagacaaaaaggaatcactgaatgcaggtattacgttatgcactggatgtcaactataatcttagtaagtttcaagaataattgtgaaaagataattggttaattcacacatatnntcattttttgtaattgatattatatattattaacttatgtcttattatatcatgcagtatttcaatgatgctagaccattaanaccagagagattgaaggcacttcgcatctagtgggcaaactact

SEQ ID NO: 18800 - DNA, 408 bp, Glycine max
agcttattcgttgccccttgaattgattgccaagctctgttcgttcatgaatcctccgccgaattgattgcctaacgctgttcgtgcatcctccatcatcaaatcttattcggagccccatgaattgattgccgttcatgcatcctccccattgagtccggagccatacgaattgactgccaagctctgttcatgcatcctttatcatcaaatcttattcgaagccccatgaattgattgccattcatgtatcctccaccattgagtctggagcccgccgaattgattgcctagtgttgttcgtgcatcctccaccatcttattcgtagccccatgaattgattgttgttcacgcatcctccaccattgagtccgaagccttacgaattgactgccgagctctgttca

SEQ ID NO: 18801 - DNA, 372 bp, Glycine max
agctttgaaattttttaaatgctattaactcttcactcggatgtccgattcaggagtatcacatattgagacgctcgaaattgaacaacggaagctctcgagaaattgaaatggccataacttttcactcggatgtccgagtcaggtgcatcacatatcgagacgctcgagattgaacgacgggagctctcaagaaattcaaatggtcataacttttcactcggaggtcaaatccacgcgcctcacatatccagacgctcgaaattgaacaacggaagctctgcagagattgacatgctaataacttttgactcggatggtcaattgatgcgcatcacatatcgagacgctccatattgaacaaccgaagct

SEQ ID NO: 18802 - DNA, 379 bp, Glycine max
  unsure at all n locations
agcttgttttgttgaaccacctaattacttangattgaaggtgtttggatcactatccttcgctcatgttaaacaaggaaagctggatgcaagggttgcaaagtgtgtgttcattggctatcctaaagaagttaaagggtacaagctatggaaattgaaacctggtgagacaagatgcatcattagtagggatgtaacctttgatgagagcagaatggcaatgctaagcaaggagctgaaggataacagctcaagtagtgagagtaccaaatttgacgtggagcattctaagatttcagatcatggcagtggagatgctattgatcacactgattaagcagaaactggagataatgaagagctggctactcagcatgac

SEQ ID NO: 18803 - DNA, 389 bp, Glycine max
  unsure at all n locations
tggtgctgatgccgcacggnctgatgatctcattcaatgtatgtgtttcatacgtcaagttcccttggttgtattgtatgattcaggtgcgactcattcatttatttctcgtgtctgtgttgaaaaacttgccttgcctgtgtcttccttgaaattttacttgattgtgaatacacctgctagtgggtctgttntaacttctgatgtgtgtttgcaatgtcatgtcttaatttctgatagacaatttcttattgacttagttgttctacctttgagtcagattgatgttattcttggtatggactggttatcttccaatcatgtcttattaaattgttntgagaaatctgttggctttcttgagtctggtgtgagtgaaagtgatatgt

SEQ ID NO: 18804 - DNA, 454 bp, Glycine max
tatgttgatgctatttctgacttaaaaatatttagaggtgagtcttccagttttgcaagttaaggaatttttttagaattatttaattcgagtaataatttttttgttagaatgaagtatcaatgtctagtttaagtttaatagtgctagcaaatagatttatttatttttatcattcacaaaatatttaattgaagtaataattgtttttttagataaaaaattaatatgtgaagtttaagcgtattaatttttgtaattaggttttttactttgaagtttttttaattatgtttaattatttacaagccttacaaatatttacctgattcccttctagttttttgaagttagaatgaaatttgaatctatattttaagttaaagttagtagatgaagcaaccaaatacagttatttatttaaaaactactcttgttatgattaattattttt

SEQ ID NO: 18805 - DNA, 410 bp, Glycine max
  unsure at all n locations
tcgacccgggatccttaagtcaccgcggctgcagcttagcattgatngnnccatgcttctcatttgatgctccccttatctctaacaatctnccccttttggctttgatgatgccaacctttaactatgacattgagtgcattggagagtattgagatggattggaaacatgatcttattaacacttaataaaggattaattcatcatgattgatgcaaccctaccccccaagggcattggatagaagactccaagaagattgngccagacaggcaagagaaggccctagggttcttatgagctttagggtagaatttgggcccatgggctaagtatgagcccacttatctttgtacatattagattangatttcattatttttgggccttgtatttanggttctataat

SEQ ID NO: 18806 - DNA, 441 bp, Glycine max
  unsure at all n locations
nggttaacaatatcctttatataatataaatgttaattaatatcttanaaatactagttaatgaacttaaagttgaaatacggaagataaacaattacaatgttcatattttttatgatttatgcatttaatattcttattcttttaattccttaactaatatctagaagcgctaattaacaagaaccatataagtaaaccaatgagtaactaacaatcccgttataaaaaaaaaggttatcatcatgtcttttttggactaatcatatcatcctatgatttcattcgacaaataataaagttaaaaatgaattgaaattaaaatacataggaccgaaaaggagttatgagttaatatatttaattaagacacatatctgttaacaaaattgatacagcatgaatgaataatgcgtctcagcgaacaaaatcttgatggtt

SEQ ID NO: 18807 - DNA, 406 bp, Glycine max
  unsure at all n locations
agcttgtagcattatgcanaccattantaacttttagctcgganatccganggagnncccgaatatatcaagaccctcaaaatgaatacaaaagctcttaacaaataaaacgaacataaactttctacacggatgtccgattgggcaacgtaacatatcgactcgctcgaaactgaataccaaagctgagagcaaattcaaacaacaatgacttttacctcggatatcccattgagtcccataatatatcgagacgttcgaaattgaatagagaagctgtgagacaattctaacgacaataactttttactcggatgttcgattgagtcccgtaatatatcgagacgttcgaaatttataacggaagctcgtagcaaattcaaacgacaataactttgaacttgga

SEQ ID NO: 18808 - DNA, 418 bp, Glycine max
actcttctgactcatgatgtagatccatgtctttcttgagtattcatcaattatggacaaaaaataccttccaccacctatagaagatactcttgcaggcccccgatagtcaagatgaatgtaatcaagagtctctttgagggtgtgaattgctttatgatattaaatcctatgttgctagccatatacacagtgctgacataatttcagttcatccaatctttgatttcccaacagttgctgtttttgaagtatcatcataccttcttcagtcatatgtcctagcctcatgtaccacaattgagtttagtcaggtatgcccttattggatcttgatggaacagttactataccatcatcaatacatgttgtaccttgaagtatatagagattacccctctttatacccttcatcacc

SEQ ID NO: 18809 - DNA, 420 bp, Glycine max
  unsure at all n locations
ttagcttcaagactaatggccttagcaaacttcttattcccaaaaggaaattcaatanataggcctcctatttttaatggagagggttaccactactggaaaacccgaatgcaaattttcattaaggcaatagacttaaacatttgggaatccatagaagttagaccttatgtacccaccatggtggctagaaatgcaacaatagagaaacctagagaatagtcgactgaagatgaaagaagattagtgcagtacaatttaaaggctaaaaacatcattacttctgccctaagaatggatgaatattntanggtttcaaattgtangagtgctaaggatatgtgggacactctacaagttacacatgaaggaacaactgatgttaaacgatctangatanatactttaactcatgagtat

SEQ ID NO: 18810 - DNA, 440 bp, Glycine max
tctgggacgcttactctggatacaactagatcatgatgctcgctccagatgaggagaaaacgacattcgtcactaaaagtaccaatttttgttacaaggtcatgcccttcggccttaaaaatgtaggcgctacataccaacgattgatggaccaagtctttaaacaatagattggacgaaacatcaaggtatatttggatgacatggttgtcaagtctcaaagcatagtccaacaagtggtagacctggaagaagtctttggggaactccgtaaatatgacatgtacctcaaccctaaaaaatgtacttttaaggtgggcggaggcaagtttctcggcttcatgatcactcaccaggggattgaagccaacctcgacaaatgcactaccatactagagatgtgtttcccgaccaacgtccaagaagtccataaactgaac

SEQ ID NO: 18811 - DNA, 391 bp, Glycine max
attgaattatttaacatgcccaaaataagttctctaatccttatgaatctttataattgcatattacataatggagaccggataaactatatatgaatttgcaatttattatgtctatttcttcttactaatatagcaatatacctaaatttcttcttgaaaaaattagtgcatgacacattaatctccaatactacagaaatattattgtatttagttcttaatatcataaattgcagtcatataaaacatggtacactttacgtttcaaaatgactaatataaccaatatttgattgtttttaaagattaacgtgagagtttatatgtttaaggattaacgttttataacaatagatatggctgctcggcggttactctatgtcttaac

SEQ ID NO: 18812 - DNA, 460 bp, Glycine max
  unsure at all n locations
tcatgtttttggtatgtacgcgaaggacttcaagtcttccaacttcatcaggaacaccaatatcaatttcactatcaaatctaccagacattttcaatgcagggtcaatgctatttggtcgatttgtaggcagtggcagtgaaattaacctcaactatataccaaaggatatccacctcatatgccgcttggggctataatctacacataaaggcacaactaaaaatctattgaggaccacgtagagaaactaaagccaccaataagtgtaaaatgctcagatcaaagatagcccaccaataaaaatgagatttttattatatatgtatgcaaaattatgaaaggaaaggtatatttgtttgataatcctagctgtcaaggaattactttntataaccattagattaaaaaaataagaggtgatataaggagtaacaaatttgtctagatataaaaatat

SEQ ID NO: 18813 - DNA, 313 bp, Glycine max
  unsure at all n locations
acaaccggccagaccctggagaacaatctagntcacactccaataataagggcacctgactggagtaaagagtttgagctcatgtacaacgctagtgactatgcagtaggggtagttcttggacaatggagagagaatgcattccatgccatttttatgctagcaagatcctgaatgatgcacaactaaattatgcaactactaagaaggagatgttggccattgtgtatgccttatagaagatccgagcgcacttaatgggctccagagtcattatctctactgatcatgcatcaatcatataccttttcac

SEQ ID NO: 18814 - DNA, 387 bp, Glycine max
acttctccaacccttgacctgacttcttggaaagccttttcacagcaaactctgggccatccttcagtcttccctgctaaccaaattgttagaaatattttgagttaggaaaacaaacatctatagttggttttccatatcaccttgtacacaggtccaaagccaccttctcccaatttgttactctcagcgaagttctcagtggctctttctatgatggggaaatcaaatgtggacaaatcaatgccttcttttctcagttttcgttcgaaatggttcctataaattattcttgctacccctgataggtttgaagataacaatagagaagcactatgacactcacaatgtgcacgtatgatacataaacctactatcatatattag

SEQ ID NO: 18815 - DNA, 417 bp, Glycine max
tcaagaataatggcctcagcaaacttcttattcccataaggaaactctataaataggcctcctatttttaatggagagggttaccactactggaaaactcgaatgcacaatttcattgaggcaatagatttaaacatttgggaagccatagaagttggaccttatgtacccaccatggtggctggtaatacaataatagagaaacctatagaagagtggttggaagatgaaagaagattagtgcagtacaatttaaaggctaaaaacattattacttctgcccttggaatggatgaatattttagggtttcaaattgtaagagtgataaggatatgtgggacactctacaagttacacatgagggaacaactgatgttcaaagatctaggataaatactcttactcatgagtatgaa

SEQ ID NO: 18816 - DNA, 460 bp, Glycine max
taacaagatttcggtgctgaagtttagcaatcagtttgacttcattcttgaactctgtcattccttgtcccgagcctcttgagagcctcttcacagcaatttcttgtccacttactaatcttccctacaaaataaataaataaattggaataatcttaatcacattgacactttttgaggtctttttcctaaaacgacaaagaagattgaatcaccttgtatactggtccaaaaccaccttctccaatcttgttgtttattgagaagttatcagtggcaatgactattgttgaaaggtcaagtaaggggagatcgatattttcttcacttcctcccctattttgatcacgtacaatatctgaatactctgataaaatggaacaatggcttcaatttagttaaaggcacaatgtatatgatagtttagtcaagtcaataactttgcagcattacatctttg

SEQ ID NO: 18817 - DNA, 418 bp, Glycine max
  unsure at all n locations
agcttgatgtctttagactgaattaactccctgatgnaaatggggtctatgtcaatgtgcttggatcattcgtggtgcgtatggttggaggcaaggcttacaacaaatttattatcacaaaacaatatcacagaggacacatcaatttcaaagtgaagaagtaaccttttcaaccaaacaacttcactagtaacaaaagacaaagcacaatattcagcctcagtggacaatttagaaacaattgattgtttcttagaatgccaagagagaacgttgtttcctacaaatacacaaaagccagaagtggaccttctggtatcaacacagctagcccaatcagcatcagtaaaggcaatgagtttgagagagctctgagcagganaaaataagccttgtccgggagcatatttgagatact

SEQ ID NO: 18818 - DNA, 464 bp, Glycine max
  unsure at all n locations
actcaagcttactaaaacaggagcatatctcttctcagatcctactctatatatatcagtagttggagctctccaatactccaccataaccagaactgagctaagttttgctgtaaacaaagtctgtcaattcatggtcatactcttgaaactcactgagcagtagtgaaaagaattctcaagtatctaaaaggctctttacaccatggcctacttctcanagctgctactccaggaattaccattcctattaaggccctatgtgatgcagattgngcttctaaccctgatgatcacagatctactttaggagctgctatttattttggtcctaaccttatatcttggtggtctaagaaacaacagattgttgcaaggtcaagtactgaagctgagtatcgaaacctatctcaagctacaactgaagtagtgtggatntattagaattctaacagtatcataga

SEQ ID NO: 18819 - DNA, 406 bp, Glycine max
  unsure at all n locations
tatcaacatcaaacttggagaaagagttcttgtggtcaagacatgagaagcaatcaagtataatgttacttccttcactaaagcggtgatccatctccacacatattttatcaatagcaacataaaaaatctctggacggtcatgatgaagattagtgatagtcctcccttctgctcttgaacgaccccgaactggtatatcgtcatccatatttggtaccagaatacttttagcaacacaaaatccttggacatcggcaaaaaaattattccagccactctctctcattgtgcccaaccgagctttgcaacatcaactaattccatggcattcacaatattaagatcttntcttcgcaatatatctgaaagctcgtttgtttgctatgacctgtatcacgcacaa

SEQ ID NO: 18820 - DNA, 440 bp, Glycine max
  unsure at all n locations
tatacatttagttaaacttcatatataactntaaacattatggcatataagatgatttttgaatatcgttaatggaatacaatcttacttaaaatggataaaattattatagaagatatttataaattaatagggtattgggattcatgactaactatcagtattatttaggacgtatttcactctatggagtgaaaaaaattatgtaaaatgagaagtaattatggatgtgtctattattaatataaataaaatatcctataaacagaatccaattaaattaaaaaaaataaaataaatgcacctttcttttcactctgtacgcgcttctcaccttttacagcaaaatagaaaatctaaaattaatttaggttgaaagtagtagttctaatttaaattcagtgatatctaaagtgataaagttaatctgtcgcttacct

SEQ ID NO: 18821 - DNA, 440 bp, Glycine max
  unsure at all n locations
nttaactgaatttgcaacgttctaattgttttttaaatggtgtaatcgattacaatatattggtaatcgattaccagtgtatctgaacgttgaaattcaaattcaattgtgaagagtcacatcttttcataaaattatttgtgtaattgattacatggttttggtaatcgattaccagtgacaagttttgaataaaaatcaagagatgtaactcttccaatggttttcaggtttttctcaaggttataactcttccaatggtttttcttgaccagacatgaggagtctataaaagcaagaccttgacttgaatttcaataactntatatatatacttttacatcctttgaatctctttgaacatctttttgaacttcttcttcttcttcttcctttgccaaaagctttctgagttttctggtttccaaaccttgttcttt

SEQ ID NO: 18822 - DNA, 371 bp, Glycine max
  unsure at all n locations
agcttgacaggtccaggtgcggttgctgctactggtggagggacttcaatttgcttgccagacctcaaggtgatggcactcacattcttcggattntgcaccatttgtgaaggcaatttgtcagaattttgggactgagcttggttcaactgagtagccatctgccccatctgatttatcagactctaaatagaggctcttgtctctntctgaaattgcatattctggatagtcatttgcctcactaactcctctaaggaaggttgagaaaagggcctcagttgcttgttgtctttgttggtggtgctgcattggaggaggaacatatggcctgcttggaccaacaacattctggaagggagggacaggct

SEQ ID NO: 18823 - DNA, 457 bp, Glycine max
  unsure at all n locations
tccctttctttggccaatgctggactcgtttggcagtgatttccttggcaatctgatgctcagaaacatcaatatccaccactccttcagtaggtctgcccaggtatttgttgatcaccgcaggggagaatctaacacactttcctctgacaaacactctttgataatcatcactttttctgtttgttatgtcagagggaatgttgacaataaattccctgactaggctttcataacagtctcccaacttggtgactgttttcagtagtccagcagccttgatgagttccatggtctccttgcaatccaaggcatttcttcccagttctctttccaaggcaagtctgcgttgatacacgtatttccacctttcagcattgccaatggagtggaatgagatgttgtccaatggtgcatcanggacattntcaggcacctttttcccagatttcttggt

SEQ ID NO: 18824 - DNA, 462 bp, Glycine max
  unsure at all n locations
ctaagctgagtcacattgggggttccagttaaacctgcgctgtgtatatacctcattatcaattggcctagtatcaacaacgttatcaactgtttgaatgccctccaaaagagttggttganaactatcattacttgaaggcagatatttatacacgactaataatccaagagtgaatatagcttgcagcttcgtagagtccccttgaactgagaagaatatgagcatggcacgtatgaacagatccacacagagacgcatgatgcatattacagtgtctattaacctcccatcgttgcctgcggggaagccacgaactcgatacacaaacagagtattgtacttgtcaaccacatatctatacccaaaataaatggcaccaacaggaaccacaatgggattaaatgaacagtatactagagtcagggctaatattgtcaaattaaaggcgtaatactgtgc

SEQ ID NO: 18825 - DNA, 413 bp, Glycine max
  unsure at all n locations
taggattaaagttcagaaacttaagagcccaacaagctttatgctctagctctatgggtaggtgacaattttatcaaacacaagtctataaggagacataccaatgagagttttaaatgttgtcctataagcccaaagtgcatcatctagtttaattgcccaatctttcctagatgcactaactgttttttcaagaattatttttaactcgctattggacaattctatttggccactagtttgtgggtgatatggggttgcaagcttttgagtcacccatatttagccaagaggccatcatacaacttattacagaagtcagtgcctttgtcactaatgatngctcgaggtgtgctaaatctggtgaannatattttctttgaaacttttttaccaccagagaatcattaatg

SEQ ID NO: 18826 - DNA, 399 bp, Glycine max
  unsure at all n locations
agcttagtcctcgtccaccagngacctgaattgaatataagaacatcagaatcaatccactcgtggctaatatcatcaatcttgtccaatctcagtgcagtcttcaccctttggggagcatgtctaggcacagaaccaggcctcaccaggaacactgatcgataaaaatcgattctaacatcaaaagtactaaacctcacacctaanaaccttatctgttttgtgatcttgttgcctttgatttcatagacactcttcttatcctcaactcctgtcattagcaaacatatcatggactcccattgcgtcctactcaaagaatcgccgacgaanaccacccttttcccacgaagtcgttcgagtattccacggacatcaaaccttggaatctcacagttc

SEQ ID NO: 18827 - DNA, 450 bp, Glycine max
  unsure at all n locations
tctctaagcttctcatccgagacactctcttggtggtgaaacttcttcttcaatggcttattccctaatagatggtgtctcatctcaccttttctcctttatcttacgttacaacttcatggctgaaaatcaccattgaaggacctcactgaagctcaaagattcagcctccatagaatcttctcaagcaagcttccatcaaaaagtactgaacacaacttgctatgttcaaaacagaatattgataagaccattgataaaaaaaactccttatgaactatagagtggaagaagacctaatatttcatactttcatcgatttggatgtgagtattttatactgaacactagatatcaacttgcaaagtttggttcanaggtggataaaataatcttcctcgaatgctctaacacatctaaagcatacaaagtgtttaactcaagaacttt

SEQ ID NO: 18828 - DNA, 367 bp, Glycine max
catcataccacctccaggtgctggaactacttcacatgtttcttgatggggcctatgccaattaagagccttggatgaaagaggtatgcctatgtcttccacaacagagtcacacttagaagacggactcctacctctccgtattaaatcatgaaagggaagaagccaactgtcaagctctttcacatctttgagaagtccctgttacactttggcgaatcaagatctaatgaaaaagatggatcccaacagtgaagctggactattcctgggatactctacctacagcagagcatatagagtatacaattccataaccatagcagcgatggaatccatcaatgtggttgctgatgatctgtctcca

SEQ ID NO: 18829 - DNA, 445 bp, Glycine max
taatggcctcattagtctcagtcttaggtccaacagcttgaggtggaaccttccaactgacctactttcccttccttccctgcgctttgtatatctccaacacaacaacttctcaggtgttattcctgattctctgccaccacggcttatctttcttgatttgtcccataactcttttacaggacaaattccagcctcaatccaaaacttgacacatctgataggatttaacctccaaaacaactctctcacaggacctattcctgatgttaaccttcctagccttaaggatttggatttgagcttcaactacttgaatggatctattccttcaggtctccataagtttcctgcctcctcatttagagggaatttgatgttatgtggagcacctttgaaacaatgttcttcagtttcccctaataccacattgtctccaccaaca

SEQ ID NO: 18830 - DNA, 439 bp, Glycine max
tgtggttttctcacagataggacatgcatgatgccttttcacactgtatccacttaaatttccatatgctggaaaatcgttaatagtacaaaacaccatggcgcgtaacctgaacatctgttgcacatttgcatcccacgcatctaccctttcttcccacaattttttcaaatcttcaattaacggactaagatacacatcaatatcattctcgggttgccttggacccgcgatcatcatacacaggataatgtatttttgcaaaatacacaaccaggggggaggttgtaaatcatcagtaaaacaggccacaaactgtggttgttgcttaagctgccataaggattcattccatcagaagcaagagcaagccttaagttccttggctcgtccccaaactctggatacaaatgatcaattgtcttccactgtggagaat

SEQ ID NO: 18831 - DNA, 461 bp, Glycine max
tctcttgattcttgaatcttcttgatttcttctcatgaaacttgaaatttatcttgatcttgaacttgttgactaaatcttgaaatcattctttggggtttttgtcgtcatcttagtcatcatcaaaacttcttgaatcaacttgattcatcatcatgaagcttgcttctacacttaacccccaagaccaaaaaccaactagcctgagaggctaggaaaaaagagccaccagtccctctaaaagagcccccatatcctttagttccatcaaagaagaataaggagcactacttcaagtgtttattggagatattcaaggggttggagataaccatgccatttggggaagccttacagcagatgctgctctacaccaaattcatgaaggacatcttcaccaagaaggggaagtacattgacagtgaaagcattgtggtgggaggcaactgcaatgcagtgat

SEQ ID NO: 18832 - DNA, 364 bp, Glycine max
  unsure at all n locations
agcttgccgcttctgagnnanactactatgtttcttgngnggnggaacaagctacaaaaggatagagcaagaaatgaatagccaatggttgatacatggacggagatgagaaagatcatgaggaagcgggatgtgccggctagatactgcaaggacttgaaattcactctccgaaatctaacaccatgcaacaaggaggttgaggagtatttcaaggaaatggatgtgctgatgattcaagcaaatattgactaagatgacgaggcaactatggctcgacttattaatggtttgactaatgatatacgtgatacttgtgagctgcatgagtatgttgacatggatgatctgcttcacaaagcaa

SEQ ID NO: 18833 - DNA, 328 bp, Glycine max
  unsure at all n locations
ctcacaactttcccaaaaaagaagtttaaagatgtgggaagccttcatccaccttgtggcatggtataaaagtgtgccatcttgctaatccaccaccatanagatagagtctacacctctttgggttctatgaagcccaatgacaaagtccatactaatgtctacccaaggtgcanatggaatgggtaagggtgtgtatagcccatgaggcatcaccctagacttggctcgtaaacaagccccactcctagtgcaatgcttatggacatctttcttcatatggngccaataaaacttctctttgagtaagacaagggtcttgtctatc

SEQ ID NO: 18834 - DNA, 442 bp, Glycine max
  unsure at all n locations
ngccagctggtagtccatggacatgccctgaagacgaagtgttttacaatgcttcaatcatttggggagtagtgggaccacagagaatgtttaccaaggatgggatttaccctgngatgaattggtttttcctgattggcctacttgctcctgttccagtgtggctgcttgctcgcanattcccaaaccataagtggattgagctcatcaatatgcccttaatcattgctggtggtggtggcatcccaccagccagatccgtcaactacataacttgcggatttgtgggaatcttcttcaatttctacgtttacagcaagttcaaggcatggtgggctagacacacttacatcctctcagctgctttagatgctggtgttgctttcatgggtgtcattctctattgtgcccttcagaattatggtgtttttggtccaatatg

SEQ ID NO: 18835 - DNA, 394 bp, Glycine max
  unsure at all n locations
ttttgcttatagattcctttgctttttttgctagacttgaagctataagaatcatgctttcctttgctactcataaaaatataaagttatttcaaatggacgttaaaagtgctttcttaaatggctttattgaagaggaaatatatgtcaaacaacctcttgggtttgaagatcatactcttccagaccatgctttcaaacttaaaaaagctntgtatggtctaaaacaggaaccacatngctggtgtgacagactgagttcatttctcttagaaatggttntattaaagtcaaagtggatacaactctttctaaatgagaaagtggcanagatttcattatagttcaaatntatgttgatgatagtatntttgaagctactaatgaatctctt

SEQ ID NO: 18836 - DNA, 428 bp, Glycine max
tatgaggtcggttatatattccttctttcaccctatttgaggtctctttttcctttcataagagaaaaattgtaaatttttagtctctcatttatatatataacacaatttcatacaagagaaattaaaaagacattgatttatttctgaaggattggaagctaacattgtcttgtactaaaactatatttgacaccttttattgcatgatcgctttctctaatatagaatctaagttagtgtattggtttagtgcaggttctgagtgatccccagaagagagcaatctatgatgaatacggagaagaagggcttaaagggcaagtgccacctccagatgccggtggccatacattcttccaaactggagatgtgccaacaacgttcaggttcaatccaagaaacgcagatgacatctttgctgagtt

SEQ ID NO: 18837 - DNA, 408 bp, Glycine max
  unsure at all n locations
agcttgtttgttacaatgacattgactgggctagagatgaagatgatcagaaaagtactagtggatatatgtttttcatgggaaatacaaccttcacttggatgtcaaaaaagtagtcgatatatagtcattcttttgacttgtaagccaaaatacctagcagttgcttcatgcatttgtcatgcaatatggctcaagaatttgttaaaagagttgggcatgtcacaagaagagttaccaagatctttgtcgataattaataagtcagtcattgctctagcaaagaatccaatgttccatgatcgaagcanacatattgatacccgttaccactacataaaggagagcacaacaagaaaggatgtacatgcangatatgtgaagtctcaagaccaagtagttgacatc

SEQ ID NO: 18838 - DNA, 306 bp, Glycine max
agataaatagtaaaaaagtgttttaaaacattgagtagcacaagaatttttcacaaaatcttttaccaaagagttctactctctggtaatcgattaccagaaggtagtaatcgattaccaatagccaacattgtttttaaaactgatttacaaagttgtaatcgattaccatgagcatgtaatcgattaccaatattttaaagcgttagatatcaaatgtcagaagtcacagatagtgatagaacattttcaaaacagtttaaacttgtgtaagcgattacacaatacttgtaatcgaataccagt

SEQ ID NO: 18839 - DNA, 443 bp, Glycine max
  unsure at all n locations
tatcatgatctggaaaagtaaaacaatgtcagttatatagtttagataatcatgattatatcagtaatttcattgcctccaatatcatataaagcatttagtataatatataacaatatatggtaacatatgagagttaaaagcttacaaacatacgcttacaaggtcatttcatatatcacaaaattgaagataacattcaatggttcatcatcaaatgttgcatcatattaatatacacattttgaataggcaacacttgcctctcagtcaaaatgcattttcagcaattggatgttatctctaaaaaagttaagattgtatcagacttagtagcacattcagcagcatgacaaaagacacaggataaataatgcaccatangatcaataccaaactggaagagataacttctcagttttaaaggtgaacactattataat

SEQ ID NO: 18840 - DNA, 406 bp, Glycine max
  unsure at all n locations
ctgctacttatatatcgagacgatcaaaattgaacaacggaagctctcgtgaaattaaaatggtcataagttttaactcggatgtccgattcaggagcttcacatatcgagatgcacgaaattgaacaatggaagctctagagaaattctaatggtcataaattttcacacggaggtcctattcaggcgcttaatatatccagacgctcgaaattgaacaatggaagctctcgagatattcaaatggtcataacttttcactcggatgtccgattcaggtgtatcacatatccagacgctcggaatngattagcggaagctctagagaaattcacatggtcataacttttcacacggatgtcctattcaagcgcttaatatatcgagacgctcgaaatttgacaac

SEQ ID NO: 18841 - DNA, 343 bp, Glycine max
  unsure at all n locations
tagctttgtttactttattnttggtaagaggctttacatattatatactaagatatctggttgaatcttccatttcttatctatggtcttgaacacttacgaagtctaccagtggtatgctaatcatgtgtatgcaattgactagatgaaactagaaggaatttggtagattggcctaaacgatttaacattatttgtggcattgctcgaggacttctttatctncatgaagattctagaatgaggattgtacatagagatctgaaaacctagcacattttactagatgaaaatttcaatccanaaatatcagactttggcttagcacgagcattcttgggag

SEQ ID NO: 18842 - DNA, 419 bp, Glycine max
aaagtctcacgattgtcacgtgctcatgcattatttgttagtcgtggctatacgagacatcttgcgaaacaaagtcaggttagcgataactcgcttgtgctttttcttccatgctatatgtagcaaagtccttgatctagtcaagtttgatgagttggaaaatgaggccgcaattatactgtgccagttggagatgtatttccccccccgctttctttgacatcatgattcacttgattatgcatctggtcagagaaatcaaatgttgtggtcctgtttatctacggtggatgtacccagttgagcgatacatgaagatcttacaagggtatacaaagaatctatatcgtccagaagcatctattgttgagaggtacattgcagaagaagccacttgaattttgtcataatacttacag

SEQ ID NO: 18843 - DNA, 399 bp, Glycine max
  unsure at all n locations
agcttatattcctattgtcctatagaggcatttcattccttctggagagtccactagctctatgatagttgtcacacctctgaacatattcataagcatccttgtgcaaggtaagccaataaaaactagattgaaggaccttggcagtagtcctctctccatcgtaattgccttcacaatgtgaactatggcaatgccacaatatgcttcttgcctccccctaagttacacatcttctcaagagattatctgctccaattttataaagattgggatccccccacacaaaatatttagtgtccttgacaaacttctttttttggaccaagtgagatcatcangaaatgcaccaattgctttgacactagtcatctcagcagaccatggccttctacaatg

SEQ ID NO: 18844 - DNA, 251 bp, Glycine max
  unsure at all n locations
atggttaataatctgcataaaggtgtgaatgtgtgtggtatgtttggtttagttcaattcttggtgcatggatngagatcccacattgactatagatatggctaaagtagaaattataaaggctggggaaatcctcacctcatgaagctagctttggagtttgagtcaagcttatctcanattcaagatggtatcagagcctatcataaattcgatattgggccaccctcaactgtccaaaaatctacatg

SEQ ID NO: 18845 - DNA, 444 bp, Glycine max
  unsure at all n locations
aatagatttagttagtcactctacttgcaaaagagagattttctagctttctaggaacttagacgttgatgaactttgtttaagataaattgaaaagtattcctagaagctatcttatgaaagatagacactccaaggtactttccaagatccttagtccaagcaatacccatttctccacttagttgatccttgacttgagtctccacatttttggaaaagaacattcaagatttctccaagctaattttctgcttagaactcttgcaaaataaattcaaaatattcttgatagaatggacctgctccactaaagccttcataaataaaataaggtcgtatgcaaaggctaagtgagatataagtggaccatgtctaaaaagacgaatagggcaccacactctntggtccacaacaacagagatcaattgaaacatatgttca

SEQ ID NO: 18846 - DNA, 426 bp, Glycine max
  unsure at all n locations
gctgcaccattgacagatntacttagtaaagaagcattcttgttgtctccagaggcagagacaacatttgttcaattgcagaaagtcatgacttcagctccagtgttagctcttcctaatttccagctgcccttcattctggaaactaatgcttccgacactggtattggagtagtattacatcagaatggccatccaatagcatttttttccaagaaacttgcacctagagtgcaaaagaaatctgactaatttagagagatgttagcaattgttgaagctatagctaagttcagacactacttgctgggacacaaatttattatcaaaactgatcacaattagtcagatgatgatgttgatggatggaacaaccgctacagacacctgaacaacaacagtggttacacaggtttttgggatatg

SEQ ID NO: 18847 - DNA, 382 bp, Glycine max
  unsure at all n locations
agtctttttgaaaagattcctaaagaagctagagcttagctacacacacctctctaatagctaagctcatctncttgagatgagaagctggaacttagctacacaccccctataatagctaagctcacccccatgacaaaatacatgaaaatacaaagaanagtccctactacaaagactactcaaaatgcctcgaaatacaaggctaaaaccctatactactggaatggccaaaatacaaggcctaaacgaaggaaaaatacctattctaatatttacaaagataagcgggctcatacttagcccaggggctcanaatctaccctaaggctcatgagaaccctanggccttcccttggatctctggcccaatctacctgga

SEQ ID NO: 18848 - DNA, 434 bp, Glycine max
  unsure at all n locations
ttagagganactcaatcacctaaatcatctgcagcatttctgtgttaagagaatccgaagtaggtgcatcagaagctcatatcatggctgaagatcaaccacgaacggttactcttgaagattattctagctcgatcgtgccacaattcttcacaagcattgcgcggccggaagttcaggctcacgtcatcacatatcctcaatccttgattcagctgattcaaggagatttatttcatggattgccaaatgaagacccttacacacacttggctacttatattgaaatctgcaacacagtaaagattgtcggtgtgccagaagatgcagtgaagctcagtttgttctcattttctttggctggagaagctaagaggtggctacactcatttaaggganacaatttgaagacttgngatgaggttgtagagaag

SEQ ID NO: 18849 - DNA, 421 bp, Glycine max
  unsure at all n locations
tcctagcggtttctaattatatggacctataaatctatatatgctgacaatagacgagaagttcgtggatctcctcgngggggagtaggtgtccgccatcgctttggccttggctagctcttcatcaatggattcctttgcatcttggaagatgaatggcaatgtaatggagacaggaagagagagaggagacgccacttcagggagaagatgagtctagaagaagctcaccaccataggaggccatggataagagcttggaggaagaaagagatgaatgaagggagaaggagagaagagcacganattttgtgctctaaatgagctctgaaatctgaagtttaatattcagatgatcaaagttcaaaaaaatgcacacatatgacctctatntataccctaagtgtcacaccaaattgga

SEQ ID NO: 18850 - DNA, 417 bp, Glycine max
tccactatggcgtagcccatagaatctatttttacccagctatcaaggaatgttagatccattttcaattcagttcccaacaaatcctcatcattctagttgttgtaccaatgacgacgacaacaacaactattggagcatggaggatatctggtcaatgcaattagccaattactgaacgggaattaaacctataaacataaatataaataatatatataaacctaagtgtctaagttccataaattaagctgtagtctctggcttaaaacatgttaggtttgtttatacaagtagttggatgtttggagtacttcggccttttgcgtaccatcaatatttaagaactaagttagttatgctccgtaacttatgggctcttaataaactatatctgcacaaaattatatatatatc

SEQ ID NO: 18851 - DNA, 409 bp, Glycine max
  unsure at all n locations
agcttttcataaaagccaaactaagcaataaagtacctcgtatttttccctctgcctccggttgtcgtgcaatcccttctacagcttgccctgcagcagtgccttgaccaaccccaggtccaatagaagcaagccctacggccaacccagcagcaataacagaagcagcagaaataattggattcatgataatttcctcgtaacctaaatataaaataaagaaatagttaatgatataatcaaccaataaattatgacttaattnttcaattatcaagatttattcggtttaaagtaattaataagaattccgaattgaaaataataatagttattgaactctacgaattacttcgagatttattttttcgtctctacctacatacatnagttttttttgtgaatatgt

SEQ ID NO: 18852 - DNA, 438 bp, Glycine max
cccttatcccatgcttctttggccgtcgatgcgttggatatcttctcaaatgtatcttcatccaccgagtgataaatgagaaagagagctttcttgtctctctttcttgactacttcaacgtctcctttacaccttggcttagcgaggcttcatcttgctcctcgaagccattctctacgatatcccacacatcttgagctcctagtagcgccttcatcttgatactccaattatcatagttgttctttgtgagcatcggcattcggaaaggaaaacctccattcgccatcttttgaggatcttgaagctctgataccactttggtggaaataaggctctttatgtctatgaaaagcgtttaggaatattggagactctgaatagacacttgataggaaggagaattctttatggaggagagaactttgtacttttgc

SEQ ID NO: 18853 - DNA, 437 bp, Glycine max
  unsure at all n locations
aaatgtggcatttgtgcacaatacacaatgtcctgtacattacaacaaaatggtgtatcataaaggcgtaatagaactttaatggatatgattaggagtatgttaatcaatttgactttacccgtatctttgtggatgtatgccttgaaaactgtcatgtatttgttgaatagggttcctagtaaggcagttccaaagacacctttaaactgtggacaaataggacacctagtataaggcacctgcatgtttggggttgccaggcagaaataaggatttataatccgcaagacataaaattggatgcaagaacaatcagtggatatttcattggttatccagaaaatgaaaggggtatatgttttattgtcctaatcatagtatgagacttgtcgaaactaanattgcaagattcattgaaaatgaataaatcagag

SEQ ID NO: 18854 - DNA, 370 bp, Glycine max
ttttcatagaaattgcgttctacctaagggtgcaaatgaaaatttcttgacactcattcctgatgtagagaattcgattggatcgaatgagtttagacccatttctcttgtgggttgtctatacaaaattgtagctaaaatactttctatttgccttacgaaagtgttgcacaaggtcattcatgagtgacaattggctttccttgaaggtagaaatatgttagatggagtggttatagcaaatgtgtcgaacatggatttcctaaattaaagggtgcattgagacctttactatgtcggttcttgtgaatgggagtccaactcacgagtccaaaaacgagacgggctcggtggtttgtacgaatgccat

SEQ ID NO: 18855 - DNA, 324 bp, Glycine max
  unsure at all n locations
tttcttttatcttctgtgntctgggaacctctccttcctcatgtgtacccaaacccaatcacctggctcaagaacgactttctttctgcttttgttggcttgccttgcatagctcgcatttttcttttcaattagagccttcacttgctcatgcaacttcttcacatactcagctctagcctgtgcatccttatgcttaaacatancaatgttaggcataggcaacaaatcaagaggagtcaaaggattaaatccatacactatctcaaatggtgaacaattagatgtgctatggacagcccgattatnagcgacactcacatg

SEQ ID NO: 18856 - DNA, 419 bp, Glycine max
  unsure at all n locations
agcttctggtcattgggcccgtaaaactcactagggatagcggtattattaaacgcagacaaagcaaccagcgataaaacccaatacagataaagcacctaaactaatagaaaagtaagcttctccagaccataccagtgcacgccgagcccatgcaaaaggtttggttaagatatgccagattccaccaagtatacaaatggaacccaaccatacatgccccccaattatatcttccaaatcgcacacactaacaatccacccttttcccccaaaaggtgattttaataaatatccaaatataatactcggactaatggtcacattggttatttttcttacatctccgccccccggagcccacgtatcatatatnacctccaaatanagagccttgaatactagatgaaacgcaccta

SEQ ID NO: 18857 - DNA, 411 bp, Glycine max
gaataatggcctcatcaaattatttatttcccgaagttattttctataaataagtctcctattgttagtggtgtgggttaccattattggaacaaccacatgcaaatttttatagagagaattcttcttcttcttcttcttcttcttattcatgagattgattaacggatcgagggtttcttaagttgaaggaattctgaacacaagggaagggttgtgcctatgtggttcagactttgtaaaaggcattttacaagatagtgaacatctcaaacgggttgtttggagattagacgtacgcacagggcatgaccgaactagtataataactgagtttgcattctctcttcccttaaaattctcttacttattggtctttatcttttgcattacagaagtttactttgaatt

SEQ ID NO: 18858 - DNA, 411 bp, Glycine max
  unsure at all n locations
ttgcttcttacaagagactaagaaatttctgacaaaaaatcttgagatgaaagatcttggggaagcctcttctgaattaggaatcaagatactaagagatcgctcttaaggtatcctaaggttttcacaagagagttatatcgataaggtcctaaatagattcgacatgaaagatagtaaaccaggagataccctgatagctaaaggagacaaatttattctcaaacaatgtcccaataatgaccttgaaagaatagagatgcaaaagattccttatgcatcaacagtaggaagtctaatgtacgctcaagtttgcactcgtnccgatatagcatttgtagtaggaagtctgggcagatatttgagtaatccttgaatgcagcatttaaaagcagcnaaacgtgtgatgcg

SEQ ID NO: 18859 - DNA, 410 bp, Glycine max
  unsure at all n locations
tgagacttttattactatattttccacttcttatctaaccttggaaaggctccacaaagagaaagccaatattagaaatatgtttatttctgatgaatggatcctaaacaagttatctaaggagcctaaggggaaagaagttgcaaaggtagtgctcatgccttctttttggaatagtgtggtttacactcttaaagtcatggctccacttgtcaaagtgattcttcttgtggatggtgaaaggaaaccagccatgggctatatttatgaagcaatggacaaggaaaaagaaacaattatcaagtctttcaacgacaatgaaagcaagtacaaagatgtgtttgcaatcattgataaanagatggaattgtcagcttcataggccattgcatgcatctacccacttctta

SEQ ID NO: 18860 - DNA, 417 bp, Glycine max
  unsure at all n locations
agctnttgatcaattcanatggtcataacttttaactcagatgtctgattcatgcgcataatatatcgagacgctcgaaattgaacaatggaagctcttgagcaattcaaatggtcataacttttaactcagatgtctgattcaggcgcataatatatcgagacgctctanattgaacaacggaagctctcaagtaattcaaatggtcataacttttcactcggaggtccgattcangcgcataatatatcaagtcgctcgaaattgaacaacggaagctctcgagaaattccaatggccatcttttcactcggnggtccgatttaggcgcataatatatcgagacgctcganaatgaatagcggaagctctcgagaaattcacatggtcataactcttcactcggaggtccaattc

SEQ ID NO: 18861 - DNA, 441 bp, Glycine max
  unsure at all n locations
tgggacatcttgacttgctttccaatctgacattctccttatattctgccttcttctattgtcagattgggaatgcctctaacagcacctttgtcaatgattttcttcatgcctcttaagtgcagatgtccaaatctttgatgccatattttgacttcatcttctttggagaatagacatgtggaggagtaactggtttcttgaggtgtccataggtaacagttgtcctttgatctgctgcccttcattaggacttcactcttctcatttgtcaccaagcattctgactttgtgaagtttacattgaatccttcatcacacaactgactgatgctgatcaagttcgcagtcagtcccttcaccagcagtactttgttcagactaggaagtccatcatggactagctntcccattccagtgatctttcctttagagccatct

SEQ ID NO: 18862 - DNA, 424 bp, Glycine max
  unsure at all n locations
ttcttttgtgttaggtattaagatactacgagattgctcttttgtatcctaaggttgtcacaagagagctatatcaataaagtacttgatagattcgacatgaaagatagtaaaccaggcgataccccaatagctaaaggagacaaatttagtctcaaacaatgccccaataatgaccttgaaagaactgagatgcagaagattccctatgcgtcgtagtagcaagtctgatgtatgcttaagtttgtactcatcccgacatagcatttgtcgtaggagttctgggcaaatacttgagtaatcctggattgcagcattggaaggcagtgaaacgcgtaatgcgttacttgaagagaacaaaaggctacatgctcacttattagaagtntgacaatntggagatcatcgggtactcagactctga

SEQ ID NO: 18863 - DNA, 440 bp, Glycine max
  unsure at all n locations
aagatttgaaacttcacatataagagatgctntattattattangttaaattaatgatgatctcaaaataaaaggtgagattgtttagcaacttatgaacttgaaaattttgagtttttgttaagtacgactatttggtatgtcatattatttcatgtaaactccattagtaaaaagttacaatcaaaagatatgggtatgtatgttgctatagaacaattgaaaggtcttatttctttttttgaaaaatatagagaagattgatttgaaaatgctataatttctgctaaagaaattggtattgaaatagatatagaacctaagctttttgaaaaatgtgttattcatagaaagaaaaacaatttgatgagaatattgataataaagttgtaaaattgcctaaagaatcatttanaattgattacttcttgtatataata

SEQ ID NO: 18864 - DNA, 415 bp, Glycine max
  unsure at all n locations
gcttgtgctatttctagttcatataccatacctttaagccaaaatgcttccttcactccttcaactagggcccttgattctgctttaataaatgaaagaacaaccactgaatggtgaattgctttccaactaattggtatacccaacaaaagaaatacatatccggtaaagactttcttgtacctacattttctacaaaatctgcatctacatagcctgtgattgctgcctcatgtgttgtcttcttgtaccttaatccagcattcaaagatccatttagataccttagtgtccacttcacagcttcccaatgtgcactgccaagatctcccatgaatctgcttataatacttacagcatgagccaagtcaggtctgctgcanaccattccatacattatgcttgcaacaccact

SEQ ID NO: 18865 - DNA, 413 bp, Glycine max
  unsure at all n locations
agcttctctgcacaaatattccgtcccctaaatatatgcgtaaatttaaaattaaaagtatgaattttatatgtatatagtttaatcatctattcctaagttttcaaagcaccaatattagagttgatttaaaatatttcagtactaaaagattatttacacttatatttaaaatgtcattttaacgtaatgtgttttaatattttaaatattatagttgtaataaaaataattacacatttattntaagtatgttattttaatgtaatatttcttaacttatttgtggttcattntttggtttataatgtggttaactattatttgtgaattttgttcttgagtcttatgtctaataaatataaaccaattttacatgtttcttacaaacattgtatctgtctcttttcttt

SEQ ID NO: 18866 - DNA, 409 bp, Glycine max
  unsure at all n locations
agcttctacattcaatttcaagcttttcgatatattacgggactcaatcggacatccgagtaaaaagttattggagtttgaatttgctcagggcttcggtattccatttcgagcgtctcgatatattacgggactcaatcggacatcagagtaaaaagttattggtgtttgaaattgctcagagcttcggtattccatttcgagcatctcgatatattacgggactcaatcagacatccgagtaaaaagttattgtagtttcaatttgctcanggcttcggtattccatttcgagcgtctcgatgtattacgggactcaatcagacatccgagtaanaagttattgtcgtttgaatttgctcagagcttctacatttcatntcgagcttntcgatatattacgggactc

SEQ ID NO: 18867 - DNA, 435 bp, Glycine max
  unsure at all n locations
attcanacgacaataactttttactcggatgtttgattgagtcccgtaatatatcgagacgctcgaaattgaataccgaagcgctgagcaaattcaaacaacaataactttttactcggatgtctgattgagtcccgtaatatatcgaaaagctcgaatgtgaatgtagaagctctgagcaaattcaaacgacaataactttttactcggatgtctgattgagtcccgtaatatatcgagatgctcgaaatggaataccgaagctctgagcaaattcaaacaataataactttttactcggatgtccgattgagtcccgtaatatatcggaacgctcgaaattgaatgctgaagctctgagcaaattcaaacgacaataacactttactcggatgtctgattgagtcccgtaatatatcgagacgctcgaaattg

SEQ ID NO: 18868 - DNA, 351 bp, Glycine max
acctcgccccgggatctctaagtcagctgcaagctgtttttttttcttgctaaacggctattgtgataaaatgttgtataataatgctctcattttctgtgtgtaattaaggtcctccgtccattcctccttcgaacgttgacctcatatgttgaaataggtttgccaccaaaaaaggaaaccattctcaacagtagcatgtcgcatatgcagaatcaattttataaggcattactgcataaggatctgtacgtcgcgaatgcacgaggagaacgtaacttcttctaaatatagcaatgctactacctaaatgctgccatcacccatatctcttacacggtgctgaacctg

SEQ ID NO: 18869 - DNA, 451 bp, Glycine max
  unsure at all n locations
tcatgctattgtaaggtntttagcacanattccaaatgagtgttgtgataatttcatatagaactatatatcagaatgtcattaaaaaaaaaaaccaatacaaacttcctcaagactccccttaatatgtcattcataagactttggaatgtagcagaggcattagtgagcctaaatggcataactagtcattcataatgtccatggtgagtcctgaaagctattttatacctatcctcaggtttcaacaaaatctggtgataaccagaccttaagtccaacttggagaaaaattcagctccaaacagctcatcaatcaattcatcaactgttggaataggaaatgtatctttaaccgtaatagaattcaatgctctatagtcagtgcacaccctccaagaaccatccctcttcttaaccaanataattggagaagaanatgggctcttac

SEQ ID NO: 18870 - DNA, 431 bp, Glycine max
  unsure at all n locations
cgacaataacttttgactcggatgttctatttgtcccgtagtatctcgagacgctagaaattcaaaacagaagctattagaaaaatcaaacgacgataactttttacacggatgtcccattgagtcccataatatatcgagacgctcgaaattgaaaacaatagcacttagcaaattcaaacgacaataagttttgactcggatgtccgattgtgtcccgtagtatatcgagacgctcgaattgaaaacagaaactgtgagcaatttcaaacgacaataactttatactcggatgtccgattgagtcgcgtaatatatcgagtcgctcgtaaatgaaaaaagaagctttgaggaaattaagacgacaataacttttgactcggatgtccgattgtgtcccgtagtatctcgagacgctcanaattcaaaac

SEQ ID NO: 18871 - DNA, 429 bp, Glycine max
  unsure at all n locations
gagattataataggattgtatggttnttaggtattgtttactctcaataccatatgcagtttctcaaggagggtggttgagtttcattctgctaattgttcttgcaatgatgttttggtacacggngttacttctacagaggtgtatgaacaagcatccactaatcaaatcttaccctgacataggtgaggttgcatttgggctaagaggaagagctatgatctctacattcatatacatagaattgtttttagtggccgttgagcttctgatattggaaggcgacaatctagannaattgtttcctcatatgaacttcanaattggtagccttagaattgaaggtaaaagtggttttgtggtgctagctgctntggtcatactaccaacaacattggtgagaagttnggagctttggctatgtttctc

SEQ ID NO: 18872 - DNA, 408 bp, Glycine max
  unsure at all n locations
agcttatgacaatttgaaattctcgagagctttcgaagattaattntgagcgtctcgatatattataagtcttaatcggacctacgtgtgataagttatgaaccatttgaatttttgagagattccgttggttaatttcgagcgtctcgatatattatgcgcctgaatttgacttgcctgtgaaaggttatgaccatttgaatntctcaagagcttccgttattcaatttcgagcttctctatatgtgatgcgcctaaattggacatccgggataaaagttatgaccatttgaatttctcanaaggttcggtagttcaatttcgagcatctcgatatattattcgcctgaatctgacatccgtgtaaaaagttatgactattttagtttatcgggagcttccgttttc

SEQ ID NO: 18873 - DNA, 392 bp, Glycine max
  unsure at all n locations
aaaaccattaaataaaagctgagtgacaaaatattaaaaatactttaatttatttaccaatgcttttcttattgaaattagtagaaagcactccccatatgtcagtgacttcaaaaaaatggaaccacataaagaaaatgagagtaattttggatctttatctacctataccaattggattgacattattcaataatttaaagttactaaaaaggttctattcaagacctttntccacttcaatagacttccttgttataaatataagaaaaataactgatttacatagtcgacatcgtttaattatattaatcttattaaagagtaatttttntcaactattctgtatggaacttntattatgtatacaaaaatcattaaactaatacttc

SEQ ID NO: 18874 - DNA, 430 bp, Glycine max
  unsure at all n locations
agctttgtttaatttgttttgacaataactntatacacggatgtccggttgagtcccgtaatatatcgagacgcctcaaatttagatccgaagctctgagaaaaattgaattgacaataactttatacacggatgtccagttgagtcccgtaatatatcgagacgctgcanattgaaaacggaagctcgtatgaaattcacacgacaataactntntactcggatgttcgattgaatcgggtaatatatcgagacgctcaaaattgagactagaagctctgagcaaattgatatgacaataactctatacacggatgtccggttgagtcccgtaatatatcgagacgctcccaattgaaacggagactcttatgaattcaaacgacaataactttttactcggatgcccgacagagtgtcgtaatttatc

SEQ ID NO: 18875 - DNA, 403 bp, Glycine max
  unsure at all n locations
caattatgaaaattaatttttgtgcgagatttaatgttgtcacatgagctatacttattggataaagtatataagtatactactaattactcatacaacatctaaattaataaaaaagattgcagtgcttatataataattattagaaagatatatnaagagattaataaaaagatgtattaggttctattgatagaggtatactaataaaaaaatacaacgaaattcattcagcatcgctattttttttttaaatttagaagtatgaaatgaaattaatctcttttgcattatacagtagaaatatataaaaaataaaataattattttatttatgatggctcattctagtgtatttcacttaaagtttctccattgaaatttctcttattgattctggatc

SEQ ID NO: 18876 - DNA, 395 bp, Glycine max
  unsure at all n locations
agctttatctactttgatggaatgaatccatatggcaatntaagcacttaacacaattcatggccaattctactagtaatntacaaattttccttccttggttgtgcatgcagtgaaaatacatgatgttgtcgatgatgatatcangcccaagacagccaggaaatgacattgatgtttatctaagtccgttgattgaaggcctgagaaagctgtgggacgagggggttctagtgtntgatgggtttcagaatgagacttttctaatgcatgcaatgctgttttgtacaattaatgactttccagcatataggaatttgagcagttacagtgttaagggtcatcatgcatgccccatctgtgaagaagacacaagctacatacaactganacat

SEQ ID NO: 18877 - DNA, 316 bp, Glycine max
tctgctgccaccatacaacctttgcccttgcatgcaactacctggagcaagtgagcagcctgaggcttatgctgcgaatatatacaatagacgctgctcaagccgcagcagcagaatctaccacagcagaacagttgtgacctctgcagcaacagatacagccctgcatggaggaatcacgctaacctcatatggtccagcccttagcaacaacgacaacagcctgctccttacttccaaaatgctgctggcccagacataccatacattcctccaccaatccaacaacagcagcaaccccagaaacaaccaacag

SEQ ID NO: 18878 - DNA, 379 bp, Glycine max
  unsure at all n locations
tatggtgttcaaggtggatgntgaaaaagcctatgactcactctcatgggttnttttggattatatgctgcanagaatgggtntttgccacacatggagacactggatgtctgcctgtctcaagtcagcaagcattgctattcttatcaatggcagtcctacaaaggaatttgctcctactanaggtttgaggcaaggtgatcctttagcccccttactctctaatatagttggagaaggcatcacatgattgatgaaggaagcagtcaaaagaacttatatagaagctatatggctggaaagaaaaacgaacccattaatatcttgcagtatgcggatgacagcaattttgtgggtgaggctgagtgggagaatgtta

SEQ ID NO: 18879 - DNA, 434 bp, Glycine max
atgaagagtccaaagcaatacacatatttaacaaatacaaaggtgaatgttttttaacacatgcacgcaaacgaacataaaggccaaaacgaacacatgcatgcaaacatacataaaggccaaaacgaaccacatacaaacgggtaaaaaaaaagaacaaaatagaaacaattgtaggcatcaaaactgatgcaatcctaccccgcaagggcattggatagaaaactccaagtagattgagccagagatgcaagagaaggccctagggttcttatgagccttaaggtagatttcgggcccatgggctaagtacgagcccacttatctatgtaaatattagattaaggtttcattattcttgggccttgtatttaaggctccataatagaggtagaggaccctagaaatataagagttttcagcccttgtattta

SEQ ID NO: 18880 - DNA, 456 bp, Glycine max
  unsure at all n locations
aatcattcaacgcattcagaatatgtgttcatccttantaaagctactctaaaataaatgacacagtcgncagcanagagtaagtatcagatgataggtgcacccctatagatnttaatgccataagtatgtccttgcccctccaacttcttaataagagcttanatcccttcagaacaaaggatgaacaaaaaatgagagatgggatctcctagtctgagacctttcccctggataataggaccaaccaagctttcattgataataacagagtagacagattggatgcgaattaaaatccacttaacccaagtcgcactaaatctcattttggccatgacgttttttaaataattcccatcgacttggtcatacgctttgttgatatccatcttcagcgcaacttgtaacctcccacatgttacccttgaccttacactgcatatgatggagaat

SEQ ID NO: 18881 - DNA, 409 bp, Glycine max
  unsure at all n locations
ggacctgcaggcaggcaagcttgatttcttttctcacatactggaatcgattaccagagaagtgtttcagaaatattctcacagtccatcttttacttgattctgatggctgcaaagcctatattatgggaactggacacaaantgccaagagtctttcaaaaccaaaaggtattatcctctaaaaagcacatcgttttatcctcttaacaaattccttggccaaattacttgtgattcaataaggaattatttgagtgctcaaattgtgcaatctatctctttcaagagagatttcttcttttcttcttcttcattctgaaaaaagggattaagagaccgacggtctcttgttgtgaaagaattctaaacacaaaggaagggttgctcttgtgtgtctagaacttgta

SEQ ID NO: 18882 - DNA, 366 bp, Glycine max
acctttgtcaatgatattcttcatgcctcttaagtgcagaagtccaaatctttgatgccatattttgacttcatctttctttgcaggtgggacatgtggaggagtaactggttctttgaggtgtccataagtagcagttgtcccttgatctgctgcccttcataaaaactcattcttctcattggcaccaagcattctgactttgtgaagtttacattgaatccttcatcacccaactgactgatgctgatcatagttgcagtcagtcccttcaccagcagtactttgttcagactaggaagccatcatggactagctttcccattccagagatctgtcctttagagccatctccaaatgtcacat

SEQ ID NO: 18883 - DNA, 408 bp, Glycine max
  unsure at all n locations
ctaataaatctatgtatgatntanaacaagcctcacgtcagagttatctttagtttcattggaatatttccttcttttggttttgaggaaacccacatggatcaatgcatattaccacaaggtcagtgggagtaaaatatgttttcttgttttatatgtagatgatattttacttgcaaccaatgatcaatgtttgctacatgaggtgaaacaatttctcttttagaattttgacatgaaagaatttgggtgatgcatcttatgtcatcagcatttaagattcatagagatagacctcgaaggattttaggtctatcataggaaacctatattaccaaattttatagtgattttggatgataattgtcaccaagtgttgctcccatcgagaagggtgatagatttaat

SEQ ID NO: 18884 - DNA, 324 bp, Glycine max
  unsure at all n locations
ttttttgtttattggcntactcaaaacaggaccacgtttcatatttcttccctagcatngacataactgtcagttactgtcgaggcttctggagcatctataacttgttcactatattctgtgcgacatttgcgtggataagctgcatcaaatctctcttgtctctctggattccttcagcacgaaagtagtttatggttgtcaattgcttggcaactgtacttcgtatctctactttgacaatcttcttccgtatcgcatgcagagaagcccccttctcaagctcttgtaacaatacttttcttgcttcctcaaataccatct

SEQ ID NO: 18885 - DNA, 437 bp, Glycine max
  unsure at all n locations
gaaactcagcttcacattcaattcaagcgtgtcgatatattacgggactctatcagacatccgagtaaaagggttattgtcgtttgaatttgttcagaccttcggtattccatttcgagcgtctcgatatattacggaactcagtcagacatccgagntaaaaggttattgtcgtctgaatttgctcagagcttcaacattcaatttcgagcgtccggatatattacgggactcaatcagacatccaagtaaaaatttatagtcgtttgaatttgctcagagcttcggtattccatttcgagcatctcgatatattacaggactcaatcagacatccgagtaaaaaattattgtcgttcgaatttgctcagagcctcaacattcaatttcgagcgtttcgatatattacgggactcaatcgaacatacgagtaaaaa

SEQ ID NO: 18886 - DNA, 404 bp, Glycine max
  unsure at all n locations
agctttagtcttttcaactgcacaacgctcttaatatgggaagagtatccttgtggaaccttcacctgacgaagacactgacaataacttatcttttccttcttggacaaagtatggcaggctgggggcaagtaaattttcttcccatcagaccttggatgcaactgtgctcttatacccatatcagctagatcttgacgggtattcaagccatccttcgtcttgccttgaatgttaaggagcgtcccaatcacactgtcacaaacatttttcttcacatgcataacatcaatacaatgtctaacgtcaagatcacaccagtacggaagatcaaagaaaatggacctcttcttccatatgcaactctgactnttatccttcttttgggtcttcccaaatacagt

SEQ ID NO: 18887 - DNA, 386 bp, Glycine max
  unsure at all n locations
agcttaactatatgtatgcgaagtgggtggaattcctagagcaattcccttatgttatcaaacataaaaagggaaaaggtaatatngtagccgatgctctntctcggcgtcatgcattactttcagagaatggtttctttagacatgaaggctttcttttcaaagaaaacaaattgtgtgtgcctaaatgttctactagaaatttgcttgtttgtgaagcacatgaaggacggttaatggggcattttggggtccaaaagactctagatacattacaagaaccattttattggcctcatatgataaatgatgtgcacaatatttgtgaacattgcattgtatgtaaaaaggcaaagtctaaggtaaagcctcatggattgtatact

SEQ ID NO: 18888 - DNA, 473 bp, Glycine max
  unsure at all n locations
actcagctagaaagcaactggatgcgttggtcaacttggtaacctatcttgttcttgaatcagaaatctgtacctgtcgcaagggtttgtggtttgtgctcctctgctgaccaccatacagaccttngcccttccatgcagcaacctggagtaattgagcaacctgaagcttatgctgcanatatttacaatagacctcctcaacctcagcagcaaaatcaaccacagcagagcaattatgacctttccagcaacagatacaaccctggatggaggaatcaccctaacctcagatggtccagccctcagcaacaacaacaacagcctgctccttccttccaaaatgctgctggcctaagcagaccatacattcctccaccaatccaacaacagcaacaaccccagaaacagccaacagttgaggcccctccacaaccttccctcgaagaacttgtgaggcaaatgactatgca

SEQ ID NO: 18889 - DNA, 418 bp, Glycine max
  unsure at all n locations
nttagttcctcccaataagtgcctgaaatatgtgtttctgatcttacacactacgtgctgttngcttgatattgccatgcatatctctatgatatcatgtgatgcaatcctaccccccaagggtattggatagaagactccaacaagtttgcgccagagatgcaagagaagaccctaaggttctcatgagccttaatgtagattttgagcccatgggcaaagtatgagcccacttatctttgtacatattagattaagatatcattatttttgggccttgtatttatggctctataatgtaagtaagggtccctagaaatgtacgatctttcagcccttgtattttaaggcacctatactagtttttgtattaagggtacttttgtaatttcacatgcattaagtgaatatgtgatgt

SEQ ID NO: 18890 - DNA, 195 bp, Glycine max
gcaagaattgcaggttaacatctaactgctccaagtgaagattctctgcagctactatgctcaaaataattctgatggtagtcatctttacaactggagagaagatctctatgaaatcaattccttgttttctgtgaaaccctttcaccacaagtctcgccttgtatcttcttttaccgtcagattctttcttta

SEQ ID NO: 18891 - DNA, 310 bp, Glycine max
  unsure at all n locations
agctnattatatcgagacgatcaaaattgaacaacggaagctctcgtgaaattaaaatggtcataagttttaactcggatgtccgattcangagcttcacatatcgagatgcacganattgaacaatggaagctctagagaaattctaatggtcataaattttcacaccgaggtcctattcangcgcttaatatatccagacgctcgaaattgaacaatggaagctctcgagatattcaaatggtcattacttttcactcggatgtccgattcaagcgtatcacatatccacacgcttggaattgattaa

SEQ ID NO: 18892 - DNA, 309 bp, Glycine max
  unsure at all n locations
agctttcattgttcaattncgagcgncncgangtggtatgcgcctgaatctgacctccgtgtgaaaagttatgaccatttgaatttctcgagagcttccgttgttcaattttgagtgtctcgatatattatacgcctgaatcggacctccgagtgaaacattatgaccatttgaaatgctcaagagcttccattgttcaatatcgagcgactcgatttattatgcgccagaatcggaccttttagtgaaaagttatgaccatttgaatttctcgagagctctcggtgttcaattttgagcggcttgata

SEQ ID NO: 18893 - DNA, 394 bp, Glycine max
  unsure at all n locations
aatgacgagtatgtgtaattgtaataagctccttagttgatattctagtcataatnaggatgcgtgctntaaagttttacaatgcttgaatntgtgtgataatcttgaatatgcatttcaacttactcatttaacttttataatattgatccatggttaaggattgaaatctttcgaaacatgttttggaaaatacttaagtttttatcccgcatcanataattgattatatgatgatataattgattatcttgatgatgatgcctttgtttttcataattgagaaagactcanaattagtctattatcttgagtgaataattaattatatggaattgaaacaaattttactatcacagataattaattatatgatgatataattgattatatg

SEQ ID NO: 18894 - DNA, 339 bp, Glycine max
  unsure at all n locations
atatatattagaggatttgtatataaatatgtaaaaatatataaaaatcattatccaaattaatatatattcaaatgattntatattcacacatgtcttgcattatgttaatttatgcaaacatantttgaaaattattatctttataagcatattcgcatttgcatatgacttttatatatatatatatataattttaataagaaaattagtaataaaaaatatattacattntgtaattattagttntatactcctatcatcataagggggaaaagtatactactaaaataaaactttaaatttattgggtttatactcatatcatcaagtgtacta

SEQ ID NO: 18895 - DNA, 257 bp, Glycine max
gacatcaaccggtccatagagtgtaaggagtatccacaaggcgcttctggcaacgacaagaggatgttgcagaggttggaaactagtttctttctaagtgggggtatcatgatggacctcattggaaccttgtggccttggatcttcttcatcaatggaagtccttgcttcttgaatttaatggcagcaaaatggaaaagaagaagagttgagaggagacaccacttcaaggagaagatgagtctagaagaagctca

SEQ ID NO: 18896 - DNA, 372 bp, Glycine max
  unsure at all n locations
ccacagcagaacaattatgacctttccagcaacagatacaaccctggatggaggaatcaccctaacctcagatggtctagctctcagcaacaacagcaacctgctccttccttccaaaatgctgctggcccaagcagaccatacattcctccaccaatccaacaacagcaacaaccccagaaacagccaacagttgaggcccctccacaaccttccctcgaagaacttgtgaggcaaatgactatgcagaacatgcagtttcagcaagagaccagagcctncattcagagcttaaccaatcagatgggacaattggctacccaattgaatcaacaacagtcccagaattctgacaagctgccttctcaagct

SEQ ID NO: 18897 - DNA, 433 bp, Glycine max
  unsure at all n locations
tctggtgggacatcttgacttgctttccaatcngacattctctacagattctgccttcnnctatnntcagagggggaatgcctctaacagcacctttgtcaatgattttcttcatgcctcttaagtgcagatgtccaaatatttgatgccatattttgacttcatcttctttggagaatagacatgtggaggagtaactggtttcttgaggtgtccataggtaacagttgtcctttgatctgctgcccttcattaggacttcactcttctcatttgtcaccaagcattctgactntgtgaagtttacattgaatccttcatcacacaactgactgatgctgatcaagttcgcagtcagtcccttcaccagcagtactttgttcagactangaagtccatcatggactagctttcccattccagtgatctttca

SEQ ID NO: 18898 - DNA, 350 bp, Glycine max
  unsure at all n locations
accttatctaggttggacctcggctggagttgaatacgtaaggctggagtttggctcattgcctgtcataggtttttnttaaagctcggctcggtttacataaaagtctggctttgcccacgagcctatttaaaaacttgcttaaagacgtctttgattaattaattattttaaaatctagtgaaatactaacttaaaaaagaaacttataaaatttcgtataagcaatgtacaaattcaaaaataattggataacaaaatcatattgaattcaagtcgttaaagtacaaagtatatcaaaagaaaataaaaagagcataatattaaaaaatgtatggattagagatgat

SEQ ID NO: 18899 - DNA, 376 bp, Glycine max
  unsure at all n locations
agcttttattgttcaatttcgagtgtctcgatagaggatgcccctgaatcggacctccgaatgaaaagttatgaccatttgaatttctcgagagctacctttgttcaatntcgtgcgtctcgatatattatgcgcctgaatcggacctccgagtgaaaagttatgaccatttgaatttctcgagagcttccgatgttcaatttcgagcgtcttgatatactatgcgactgaatctaacctccgtgtgaaaagttatgaccatttgaatttctcgagagcctccggtgttcaattttgagcggctctaactgtgatgcgcctgaatcagacatccgagtgaaaagtatggaccattgatttctcgagagctcccgtg

SEQ ID NO: 18900 - DNA, 290 bp, Glycine max
  unsure at all n locations
agcttttattatttttgccagctgcatcanaatgggaaacaactggaggtttttgagtctttgcctcttggcattgattgcatcaactcatgctcaacttcagcttggtttttatgctaataatcgcccaaaagcacagcaaattgctttgaaatttgttcatgaccatatccataatgcttcatcactaccaactgcattaataagaatgcactttcatgactgtttttgtaaggtacgtgcttcaatctttaagcttctgtcatttttacttaacacatacaatgtta

SEQ ID NO: 18901 - DNA, 227 bp, Glycine max
  unsure at all n locations
cacactgtattaacatgaagctgacgatttcaccaatccggatgaaagtatttgtgagtttggacttgagtgtttgtgagccaccttgatgtcaccctaacatcaagtgttggacctgagtgtgtagaagtgatctctattgntcagagagcaatctctggtgtgtatttgatttaattgtatacaccggagagtgattgagagggagtgagaggggttctcatatc

SEQ ID NO: 18902 - DNA, 277 bp, Glycine max
  unsure at all n locations
ttttgggggtggccatttcttggatggccttgattttctcaaggtccacttggaccccatttctaccaactacaaaacctaagaagactatattatctacacaaaaggtacacttctctatatttgcatagagggtgtttttcctaaggactgaaagaacttgcctgagatgtcctaagtgatcatctaggctcctactgtacactanaatatcatcaaaataaacaactacaaatctacctatgaaatccattaagacatgatgcataagcctcat

SEQ ID NO: 18903 - DNA, 186 bp, Glycine max
  unsure at all n locations
agcnttaaccaagangggatggtccatttcaagtacttgaaaagataaatgacaatgcgaacaagattggattgcctagtgagtataatgtgagtactacatctaatgtgtttgacttaactctttttgatgtagatggagaagccgatttgagaacaaatccttttgaagagggagagagtgata

SEQ ID NO: 18904 - DNA, 187 bp, Glycine max
taccacttgcacggtgctggaactacttcacatggacttgatggggcctatgcaagttgaaagcctaggaggaaagacgtatgcctatgttgttgcggatgaattctccagatttacctgtgtcaactatatcagagataaatcatactcctttgaagtttcctggagctgatctacaacttcatag

SEQ ID NO: 18905 - DNA, 383 bp, Glycine max
  unsure at all n locations
agctttaactttatttttcataagcactttgtgcttgtacattccaccgcaacgcacccttcttcaaacattcggtcataggacttgctatagagctaaaattctggataaagcgtcgataaaatgatgcaagaccaatgaaagatctcacctccgaaactgttgtacggctcggccaagtcttgatagcatccacttttgcntgatcaacggatactccatctttagacaccacatatncaagaaacaccaccctttcaaccaagatatcacacttttcccttctcccatagagttgttgtgctcttacggtctcaaatatttgtttcaaatgagtgaaatgctcctctatagattngctatacaccactatgtcgtcaaga

SEQ ID NO: 18906 - DNA, 303 bp, Glycine max
ttgctagagacagtgtcaatgctatgtatatggtttctttctttgtggcaccaaaggcttactcatatcagtgagaatgggctgaattgtttagccaagaaggatatgcttctacgattgaagaatgcaaatttagagaaatagtctcattgcatggttggtaagaaaaccaaagtatccttcaagaagaatcctccctccagaaaatctgagttgcttgaatcggtgcattcagatgtatgtgaccctttgaaggtgaaatcctttagtggtgcactttattcttgtaccttcattgatgac

SEQ ID NO: 18907 - DNA, 303 bp, Glycine max
  unsure at all n locations
gatgctcanaaacatcaatatctatcactccatcagtaggtctgcccagatatttgttaatcacagcatgggagaatttaacacactntcctctgacaaacaccttntgatactcatcactttttctgttagatatgtcagagggaatgttgacaatgaattccctgactaagccttcatagcaatctcccaacttgctgacagtcttcagcagtccagcagccttgatgaggtccatgatctccttgcaatccaatgcagctctttccagttctctttccaaggccagtcttcgttgataca

SEQ ID NO: 18908 - DNA, 392 bp, Glycine max
  unsure at all n locations
tatcttgtatgtcttggatcttcttcatcaatgaattcctttgcttcttgaggtttgattgcagcgaagtggagaaggagaaagatgaatggagatgccacttcaagtagaagatgagtctagaagaagttcaccaccataggaagccatggataagagcttgaaggtagaagaagatgaatgaagggagaggaagagaagagcatgaaatttagtgcctcttaagaagactgaactttgaagtttaattctcatatgatcaaagttgaaaaaatgcacacacaagacctctatttatagcctaagtgtcacacaaaattggagggaaatttgaatttctattcanatttcactcgaatntgtggagccaanatatcactaattatgattag

SEQ ID NO: 18909 - DNA, 279 bp, Glycine max
  unsure at all n locations
tagganaatgatcttagaggatttatatatgagcaacttgtgtactccaccctgggctgccaagatgtatcaggatctcacgacaatgttttggtgaccaaacatgaagagagaggctagtgagtttgtgtatgtgtgtatagtatgtcagatcgctaacatagaacatctgagaccctcatgtaagttgcaacactttgagatacccagaggaagtggaatatttttcattgatttcattgttgactacctaggacccccaaggtttcgatctatcta

SEQ ID NO: 18910 - DNA, 401 bp, Glycine max
  unsure at all n locations
gcttgtgattatcatgtagaggattcatcanaaggagttgaccacgaacaacactataagattcattcaaccccatgagaaattgcatcaacttgcgtcttttgttgtttgcttcacatgtgcaaatagcatcattataggatcctaactcatcccacaatttttttttaactttgtatagtatgcagcaactatcatttgatcttaagtaaggcaagcaatctctctctcgatctggaaaatgagtggtgcgttgctttgaaagaaacaattttgaagatcttcccaaacttcatgagcagtgtaaanaaaaataacactatctgtaatatcaggggtcattgaattaagaatcccatgacaaaccatatcattgcattnttcatgctacatagtcttct

SEQ ID NO: 18911 - DNA, 419 bp, Glycine max
  unsure at all n locations
agctntgagcttattcttacgacaataactnttgattcggatgtccgattgtgtcccgtattatatcgagatgctcgtaattgaaaatagaagctctgagcaaattcaaacgacaataacttttgactcgggtgtccgattgtgtcccgtagtatatcgagacgctcgaaattgaaaacagaagcactgagcaaattcaaacgacaataactttttactcggatgaccgattgagtcccgtaatatatcgagacgctcgtaattgaaaacagaagctctgagcaaattcaaacgacaataacttttgactcggatgtccgattgagtcccgtaatatatcgagacgctcgcaattgtaaacagaagctctgagcaaattcacacgacaattactttctactcggatgtccgattgagtc

SEQ ID NO: 18912 - DNA, 339 bp, Glycine max
  unsure at all n locations
tatcctctacgacaatcaactcggcggcaaaattcccggctctatcgggaaccttaagagccttcaagtgataagagcaggtggaaacaagaacctggaaggccttttaccacaagaaattggcaattgttccagtttggtcatgttgggtcttgctgaaactagcctttcaggttctctacctccaactcttggcctcttgaaaaaccttgaaaccattgccatttacacttccctactctcaggtgaaataccacctgaacttgngtactgcacaaggcttccaaacatatatctttacgagaactccctcactggatccataccaagcaagttggg

SEQ ID NO: 18913 - DNA, 154 bp, Glycine max
tctggtgggacatcttgacttgctttctaatctgacattcatttcagattctgccttcttctatgttcagattgggaatgcctctagcagcacctttgtcgatgattttcttcatgcctcttaagtgcagatgtgcaaatctttgatgccatat

SEQ ID NO: 18914 - DNA, 372 bp, Glycine max
  unsure at all n locations
tgagcgaatccaaacgacaataactgtgtactcggatgtcttattgagtcccgtaatatatcgacatgctcgaaattgaatgttgaagctctgagcacattcanacgacaataactttttactcggatgtctgattgagtcccgtaacatatcgagacgctcgaaattgaatgttgaagctctcagccaattcatacgacaataacttttttctcggatgtctgattgagtcccgtcatatatcgagacgctcgaaattgaatggtaaagctctgagccaactcatacgacaataacgttttactcggatgtctgattgagtcccgttacttatcgagacgctccgaattgaatgttgaagctctcaaccaa

SEQ ID NO: 18915 - DNA, 393 bp, Glycine max
  unsure at all n locations
agcttgaattttatgttgatttgacagagagaaatacttgtagcttgttgaagttactagaatttggtggtttgctataagaacttgacattgtcttggtggttgagatgaaccaacataaatntgatgtgtcttattcttttttatttctcttttgctatttgatctgttagggtttgaatttgatctttattatttaaaaactttgtttgttttacaaagatttgaaactatcatcttatttgttntgcaaaagtctgatatctgttttgttaagtcttacttcacaagacaataactntattantttacgaaaaaattatttttttatgaaaattacaattcaatcttatttcttgtaatatttatttttgcaatattattatattgtat

SEQ ID NO: 18916 - DNA, 381 bp, Glycine max
  unsure at all n locations
ntagcttccactcgtaagaccatatgccactagaccagtctattctagaatatagaaaataaacttcatggtctcgaatacatgtagcgtgcctaaactntgaggtgtaacatcccaaaaataatctaataattatctagataaagatatttaaatatatcttttattacacgacaagatagattaaataatttaaatatatcatataatgatttttatttcgaacagaggttactataataatatataagatttggtaacgataaattaacgataatagaaagtatagataaagaaggatcatttaacagattgcaaattacacacaattcttaatatatggttgacagtctttctcttagaacacacacataaaggatc

SEQ ID NO: 18917 - DNA, 346 bp, Glycine max
ttcgaatggtcttatacttttcactcggatgtccgattcgcgggcataactcatctagatgctcgaaattgaacatcggaagctctcgagaaattcaaatggtcataacttttcacacggatgtccaaatttaggacataatatatcgagacactcgaaattccacaacggatgtactcgagaaatttgaatggtcataacttttcacacggatgtccgaatgtgggacataatatatcgagacgctcgaaattgcgctacggaagcactcgagatttcgaatggtcataacttttcacacgaatgtctgattcgcggacataactcatctagacgctcgaaattg

SEQ ID NO: 18918 - DNA, 316 bp, Glycine max
tatgaagagagaacaatttagagagtgatcgaagactttcaaatggatttccactgaatttattcatagagagatcgagatatcttaatgatgaaagttttccaaatgatctaggaagagcaccaccaattgagttgttggaaaaaagtaacgtgtcaatatttttaaatgccccaatatgatctgtcagattgcctgaaagtcgtgaactctgaactgcaagtcttgtgagtccatgggaaatacaaggagcaagaatttctaaaagttcattaacctgttggttgagtttgagatatgataaatctatcaccct

SEQ ID NO: 18919 - DNA, 349 bp, Glycine max
  unsure at all n locations
gcttagctacacanccccctataatagctaagctcacccncatgatataatacatgaaatacttaaaagtccctactacaaagactactcaaaatgcctcgaaatacaaggctataaccctatactactagaatggccaaaatacaaggcccaaacaaaggaaaaacctattctaantattacaaagataagcgggctcaaacttagcccatgggctcggaatctacccttangctcatgagaaccctaaggccttcccttggatctctggcccaatctacttggtgtctattatccaatgcccttgtggngtaagatngcatcattccctccaccttggaaaggattt

SEQ ID NO: 18920 - DNA, 252 bp, Glycine max
  unsure at all n locations
ttatgttgcanatatttacaatagacctcctcaacctcattatctaaatcaaccacagtttatcaattatgacctttccagcaacagatacaaccctggatggaggaatcaccctaacctcagatggtccagcccttatcaacaacaacagcagcctgctccttccttacaaaatgctgctggcccaagcagaccatacattcctccaccaatccaacaacagcaacaaccccagaaacaaccaatagttga

SEQ ID NO: 18921 - DNA, 380 bp, Glycine max
  unsure at all n locations
agccttgaatttatcttttctatgtcttgaattgaacctaatctaattatcaaatattataaatcacatttcgttgtgggggaatgtgaggctcanagaacattgtgtattttccatctctctttgcagtgcatatgatagagcggctattaaattccgaggagtggaggcggacattaacttcaacattgaagattatgaagatgacttgaagcangtgatcaatttgtgaatatttatattttgttntatcttatcttgaacagtcacacctcatacgtataggatcaccttatctcctacagttagtgctatnttttctgtcttgaagtactctcatgaatttgttaaatgcaatgttaatagatgagcaatcttac

SEQ ID NO: 18922 - DNA, 439 bp, Glycine max
  unsure at all n locations
ntaaaggatgttntatcagtacaaaaatatatgtntttgctctggtaattgattaccaaatattgtaatcaattactagagatacattaccagagacaaattacataaaggctttttcaaaaagaagtttctcttttgaaatttgaattttaaatgctgtaatcgattaccacttgtatgtaatcgattacctgtgatgaaatttcagaagttaacattgaaaagtcgtgacctttcaaaacataactatgtaattgattaccaagaagctgtaatcaattaccagtgagagaatttttgaaaaatattctgaaaagtcacgtgtctntcaaaagttttgaaaagccaccaaggacctataaatacgtgacttgtctacgaanaacattagagttnttcattagaacctangtgacatattctctcaaaacaaatcatt

SEQ ID NO: 18923 - DNA, 276 bp, Glycine max
  unsure at all n locations
ttacctccttgagataagaagctagagcttagctacacacaccccactaatagttaagctcacctccatgccaaaatacatgaaaatacaaaaaagtctctactagaaagactactcaaaatgcccttaaatacaaggctaaaaccctatactactagaatggccaaaatacaaggcccagaagaagganaacctattctaatatttacaaagacaagtggacccaaccttgacccatgggctcaaaaatctaccctgaggttcatgagaatccta

SEQ ID NO: 18924 - DNA, 353 bp, Glycine max
agctttcacttacatacgaagatttgtgagtgacaaaccatgttgtcattcttgacaagataaccaagaggcatgtccatgtatactccctcaatcaaatcactattgaaaaacacattatttaaatcaagctgaaacatgttccaatttctgtgaggtgcaatggaaagaaacactctcattgccgtatgcttggcaacaagtgagaaagtgtccaaaaaatcgatctctgcttgtatgttgttgtgtgtaaccttttgcaacaagacgagccttgtatctatcaatggagccatctgctctatacttgaccatataaatccatctgcaactgatgggtctattatcgggtg

SEQ ID NO: 18925 - DNA, 402 bp, Glycine max
  unsure at all n locations
agcttccagtttattttcatattntcagctcctagtttatagcttataagctttcaactaacttattaattagttttaccaaattaaatttgttagtttataagttttacctagtttataaatgaaaaaataaattaagctaaaataaaatgttcgtcttttatgtattttttgtttctactctgctcctctaatttagnctcttataactttcgggaagataatagaaaatggaatcgattgaaacatagtagaatgggtgaatcatgaatagaaagaattaacaatatgtcactctattattaaataatgtagatgtataatataatggtcaaaaattagattccatcatttgataaaaggagttgaataaattatctttttattcattatgaaaaataa

SEQ ID NO: 18926 - DNA, 456 bp, Glycine max
  unsure at all n locations
agcttgaagttatatgttaaaataactnngtgtattctttttacattctcttgcaacagcctncacttgagnnttatcattanannagtgttcagggaatnntaatccaaacctattaannattgatcccaataanaattgatnaatcgagcanaattgttatanaaaaatacctaaacacttcaatgcnagttcggttttgtgattctcatgttcaaaattgaactgagtcaaattggaaacgtaactaaatttatattagtcttattttgtcttctttntttactgcaattcctatatatttatcttgaaatacaatttaaccttatttgaacttatattattatttctgaataacttgaagataatntgcaatntagtctgtgatttagatcaagttgtggttttatgaccagaattaatagtttgaaatgatatttctgtatatgcattatg

SEQ ID NO: 18927 - DNA, 364 bp, Glycine max
  unsure at all n locations
tatctntgatttcccgaaaactcacctcgttttatctgtgcattccaaattctcaaaagagtcagtcttgtggcatatcanattgcattacctccgtgtctttctaacctccacaatgtctttcacatgtctcatctccataaatatatccatgatccatctcacatggtcgaattagatgaagttcaagtgaaggagaacttgacatatgaaacatttgctttgaggatcgaggataggcagacaaagcacttaagaacgaaagagattttattggtcaaggcagtctggggaggtgctttacgataggaggcaatttgggaactagagattcaaatgcgagaagcctatcctgtcttgtctg

SEQ ID NO: 18928 - DNA, 360 bp, Glycine max
  unsure at all n locations
agctnttctatgaatcctcttacatgagaagaanataatgaaatgagnttttttttttaaactaaaattaattctccattaactaaatattaattaatttatagatatcatatcatctatgagagaaattatactaaagaggctcttatcctcttttgggggggttatttgctctatctagctcttgttctctatatctttgcaaataccttctcaatggctctgcatagtcgtcaaaaccaagcgaccccaaggcccagcatatgtcatccccgttcactgtcttactcctttccttcctgcacttctccgacgcctcgctggttacaaagcttatgaactccgacacgcactcttgca

SEQ ID NO: 18929 - DNA, 364 bp, Glycine max
agcttcatttaatccatgccgacatctgtggtcccattttgcctccctcacacagcaacaaaaggtacgttctaagctttattgatgattattcacgtaaagcttggatctactttttgcatgaaaaatctgaaacaaatactgtgtacaaaagcttcaaagcctgtgttgaaaaggaagctggtatctaaattgtttgtctaagataagatagaggtggtgaattcacctctaaagagtgtacagaattatgcactaatcaatgtatctctaggcaattgacgggtgcctacaccccacaacagaaaggagtcgccgaacgcacacaccgaactatcatgaatgttgtacgagctgtattaca

SEQ ID NO: 18930 - DNA, 402 bp, Glycine max
  unsure at all n locations
tcgatggagaagaataaagcgcgagcaaaatagggctcgcaatctaatattntacaatgtatgtacaacatcggttatcaatacaaaaccgatgttaactaaatgatgttaacattaacatcggttttctacaacaaaccgatgttaacctatcttatgttaacatcggttnttctaanaatcgatgttaacatactgactttaacatcggttattcaaaaaccgatgttaccagtttcatgttaacatcggtttttaaacaactgatgttaacataagctaattaacatcggttttctaaaaaaccgatgttaacaaattcacattaattacaattatgccaccatgttaacgttaacatcggntttgaggaaaaccgatgttaaacgtacgatgttaaat

SEQ ID NO: 18931 - DNA, 405 bp, Glycine max
  unsure at all n locations
ttgcttgcgtagtacaactcataatcaaattattaaatgttttttgagaaaaaccaaattcatttagcgtcaatttcaagaagccccaatcaactttatcatagactttctgcaaagtcaattnttagcctaagattcccttttttattatgcatgtgatgggcaatctcctgagctattatagcattatcagatggatctctattaggaatataaatgctttgcaaagggccaataagactatcaaaatgaggttgaatgcgattaacaagcacttcagagataattttgagatcgacattgcataactgatgggcctaaactcttttaaggaagaagggcaatccactttggggatagttacaataagagtttcaaccaaacttggattgatggagcctaaag

SEQ ID NO: 18932 - DNA, 283 bp, Glycine max
  unsure at all n locations
ataatataggatgattatggatccaacatataccttagtcatgatcaatgcagcatggtaacaaaggaaatgtatggaaactcactangtgccagctattcttgtgctcacatgggtttctgcctcatcattaagcttagcctagtccaaatcaaatatcttggggttgagatctttataccacaacacattattggccttgatgtccctatgaacaatcttcatgttggactcttcatgaaagtagccaaacctatagcgataccaacacgaaatctatgct

SEQ ID NO: 18933 - DNA, 238 bp, Glycine max
ctctgcagggaatctaagtgtgaagcatgctattctgcacacgattgtagctgccaactgggtacccactaatcatacttccactgttgccacaagttcgagtaaatttctgtatgctgtcggaaccacatccaaatattatctggaaactatatctttgatcaaactgtcaaacattcataatctttagctatcaaataagccattgccttccctactgtattgtgtgcattatgac

SEQ ID NO: 18934 - DNA, 337 bp, Glycine max
  unsure at all n locations
tttcttgcatttctctcttcccttanacttcttttatttattgctatgtatctcttgctttaaagaagttaattatgaattgtcttttgagtaattcatgttaacggtgcattgttaatccgaaaagagagagtgatagtttaattgaggaatagtctttgtatcttaattcaacccctttctttcttaacgttactgaagccatttgtcaacatcctattcttgacaactcgcttctctaagaagaccaactctcctgccttgataaatgaagccccatgaacgtctatatttttacttgaaaacacagtcatcaaatgtcctttctctttttgaa

SEQ ID NO: 18935 - DNA, 339 bp, Glycine max
  unsure at all n locations
tatctntctttcaattcacacgacaataacgttntactcggatgtctgattgagtcccgtaatatatcgataagctcgaaattgaatgttgaacctctgagcaaattcaaacgacaataactttttactcggatgtctgattgagtcccgtcatatatcgagacattcgaaattgaatgttgaagctctgagccaattcaaatgacaataacttattactcggatgtctgattgagtcccgtcatatatcgagacgctcgaaattgaatggtgaacctctgagcgaattcacaccacaaataacttttactcggatgtctgattgagtcccatattata

SEQ ID NO: 18936 - DNA, 416 bp, Glycine max
  unsure at all n locations
tgctaacccatggaagctcctaatatctcccacactntntgagatgggccattcatggatggccttgattntctcaaggtccacttggaccccatttctaccaactacaaaccctaagaaaactatattatctacagaaaaagtacacttctctatatttgcatagagggtgtttttcctaaagactgaaagaacttgcctgagatgtcctgagtgatcatctangctcctactgtacactanaatatcatcaaaataaacaactacaaatctacctatgaaatcccttaagacatgatgcataagcctcataaaggtgcttggtgcattagtgagcccaaaaggcatcactagccattcatacaaaccaaacttggtcttgaaagcangtatccacttatcaccatttttcatcc

SEQ ID NO: 18937 - DNA, 325 bp, Glycine max
  unsure at all n locations
tcaacctagaggagacggaccattccaagtgttggagaagatcaatgacaatgcctacaagattgacttgcctagtgagtataatgtaagtgccactttcaatgtgtctgatctatctctntttgatgcagatggaggggccttggatttgaggacaaatccttttcaagaagcagggagtgatgaggacataaccaaggtcaaggaccatgnaacacttgaagggcccatgaccagaggcagacttanacaagcccaacacgtcatagagacaaagctagtcatttgtatagctgccattgatgatgattgaaggcccaagtgg

SEQ ID NO: 18938 - DNA, 482 bp, Glycine max
  unsure at all n locations
taagagtntaaccatgcgtagatatcctatggtaatatctcatttttttaccatttgaatagtgtaaaaacactacccaatcgcctaacaaaacaataatactgtctaccacacacacatgaaaaattgngatgttaccgtgtttgtttgacattctttgtcttcctaggagtgtatgtaataatatctttgtagcacacatgagaccgatgttgtttggtaagagaaaaataagattctagtaaatttagagagtttgataagcactgtgctacttcaacaaatataaagatatgtgaaatttggtgaagggatatcttcctcaaatacttgtcaattaatataagcatacaaaatanaattaaatataatataaatcataaaatattctactaattataagatcaacattggataataagagtaagaacacattattatttaaacagttgaaagataaaagtaatattattaaagaacta

SEQ ID NO: 18939 - DNA, 404 bp, Glycine max
  unsure at all n locations
agcttgagtatagagacttctcaagctatttatcttctctctcagagagactctctcattggattgataggaatgaaggctcctacccttatttatactactctacctccacaatgaatggtggagattacttgtatcatanggtggagattaattctctagaatgttgcacacattctatgagtctttacactcttctactcttttccatatccttccataaggttccacacatctctagaatattctagaggtttccacattcttccacaagcttctagagagttctacactactctagagttctctaggacgttctaaaaaattctatactnttccagagatgtctagaattttctagaacttctccaattaagaaaggattccaacaattgtaatgtatc

SEQ ID NO: 18940 - DNA, 386 bp, Glycine max
tttcttgtgtatccaataccctgatgaggatgtcccatatgttcttaaaactggactgatccatttgcttccaaagtttcatggtcttgcaagtgaagacccacacaagcatctgaaagaattccatattgtttgctccaccatgaaaccaccagatgtccaagaggatcacatatttctgaaggcctttcctcattctttagagggagtggcaaaggactggctatattaccttgctccaaagtccatcacgagttgggatgacctcaagagagtattcttataaaacattttccctgcttccaggaccacgaccatctgaaaagatattttaggcattacaaaactcagtggagagagcctatatgaatattgtgagagattta

SEQ ID NO: 18941 - DNA, 417 bp, Glycine max
  unsure at all n locations
ctagattcatcacttaccccaagcaatacacactgcaagctcttgtcatccagctntgttcttttctgatcaggtacatggacatgagttangcacccaaatactttaaagtaatctactntaggtttgattccactccacatctcttctggagttttatctttcactgtcaatgtgggactcctgtngagaacatgaactgtccattttgcagcttctggccaaaaagccttaagtacttgtttgtcacaaagcatgcaccggaccatattcataatggttcgattttacacttcgctacgccgttttgttgtggagtgtaagatgtngtgagttgcctgcttatgccatgaattntacaaaatcattaactcatttgaggtgaatcaccccccctatctgtgcgtaacaacatat

SEQ ID NO: 18942 - DNA, 443 bp, Glycine max
  unsure at all n locations
cttctacattcaacctacagtcttctcanatgtttatgtacatctttctagttgcattntcaccttatcagaagagactctgnaaagttaaaatacaactcataatgctttcaattgaatntgtaacaatcaccaggatggcatgctgattgcanaggatgagatctttggtccagtcaatccatattannaatcaagtaagaaaacaactagtgttagttaattactttgcagagaatggtattatactaccatacatgtgttgtgctttgtgcattaatttttgtgttgatgactccagggaccttggtgaggtagttcatagagcgaacaacacacgttactggcttgcggcaggaagtgtcacaaagaacatggacactgcaaacactttgacgcgggcactgagagttggaacagtttggataaactgctttgacaca

SEQ ID NO: 18943 - DNA, 369 bp, Glycine max
  unsure at all n locations
agctntctatatattcaaatggtcagagcttttcacacggaggaccgattcatgcgcgtaatatatcgagatgttcgtaactgaacaacagaagctctcgagaaattcaaatggtcataacttttcactcggatgtccaattcatgcgcatcacatatctagatgctcgaaattcatcaaccgaagctctatagaaatgcanatggtcataagttttcactcggatgtcacattcaggcgcatcacatatcgagacgctcagaattgaacaatggatgctctcgagatattcaaatggtcataacttttcactcgcatgtgtccaattcaggggcatcacatatcgagacgctcgatagagaacaacgg

SEQ ID NO: 18944 - DNA, 480 bp, Glycine max
  unsure at all n locations
tcaagaaaaagatggcctcagcanattccttatttccagaagggaattctatcaatagacctccaatctttaatggagagggttaccactactggaaaacccgaatgcaaatttttattgaggcaatagatctaaatatctgggaagccatagaaatagggccttatatacccaccacagtagaaagagtttcaatagatggtagttcatcaagtgaaagcataactatagaaaaacctagagatagatggtctgaagaggatagaanacgagtacaatacaacttanaagccaaaaacataataacatctgccctgggaatggatgaatatttcagggtttcaaattgtaagagtgctaaggaaatgtgggacactcttcgattaacacatgaaggaactacagatgttaaaagatctaggataaatgcactaactcatgagtatgaattatntagaatgaatgcgaatgaaaatattc

SEQ ID NO: 18945 - DNA, 309 bp, Glycine max
  unsure at all n locations
agcttcatcatttcatttcgagggtctcgatatattacgggactcaatcggacatccgagaaaaagttattgtcatttgtatttgctcagagcatcaacattcaatttcgagcgtgtcgatatattacgggactcaatcagacatccgagtaaaaagttattgtcgtttgaatttgctcagagcttccgtattcaatttcgagcgtctcgaaatattacatgactcaatcagacatccgagtaaaaaattattggtcgttgaattttctcanagcttcaacattcaatttcgagggtctcgatatatta

SEQ ID NO: 18946 - DNA, 447 bp, Glycine max
  unsure at all n locations
ntgagggatttcanacgacaataactntntactcggatgtctgattgagtcccgtaatatatcgagacgctctaaattgaatgttgaagctctgaccaaattcaaacgacgataactttttactcggatgtctgattgagtcccgtaatacatcgagaccctcgaaattgattgttgaagctctcagcaaattcaaacgacaataacattttactcggatgtctgattgagtcccgtaatacatcgagacgctcaaaattgaatgttgaagctctcagcaaattcaaacgacaatagcttttttactcagatgtctgattgagtgccgtaatatatcgagacgctctanattgaatgttgaagctctgaccaaattcaaccgacgataaatttttactcggatgtcttattgagccccgaaatacatcgagacgctcgaaattgaat

SEQ ID NO: 18947 - DNA, 382 bp, Glycine max
  unsure at all n locations
agcttgtttggttctcctttgccaatgtcaaatctgtaacctggtggaagccacagaacccaatgttttcttttgtcattctacttatgtagtagaatatagtataccagctccatttacaaagacttgaaaagactaaccattccttccatctttgaggtaaatngaccaccacattgttgcttcagttttgtcaaaatacttctctcatgatcatcattggcactcttgtcaaaaaggagccttcgagcaagcttcttcctacaagcaatcacgcaagaacatgtntgactattcttttgcaagcatcttacagtangaaaaaaggtaatgatgacactcaaattagccacagaaagcagaattcaatgatagactacca

SEQ ID NO: 18948 - DNA, 412 bp, Glycine max
  unsure at all n locations
ctatagcaaactcaagctntcaagaaattcaaatggtcctaacttttaactcggaggtttgattgatgtttataatatatcgacacgctccaaattgaacaatggaagctcttgagcaattcaaatggtcataaatagtcactcggaggtccgattcatgcgcataatttatcaagacgctcgaaattgaacaacagaagctttcaagaaattcaaatggtcataacttttaagtcggatgtccgattcaggcacataatatatcgagactcacgaaattgaacaacggaagctctcgagaaattcaaatggtcaaaacttttaactcggatgtccgattcaagcacataatatatcgagacgcgcataattgaacaacggaagctctcgagaaattcaaatggtctaactt

SEQ ID NO: 18949 - DNA, 414 bp, Glycine max
  unsure at all n locations
tggggatttattntaggacaaaactcagatacagacattctttttcataggtatttttggtgttcttcaattagaattggagttttacctatgtaatatatgttgatcttttatagaagattttattacgtggattatcaagatgaaactccaattctgatcggagaacaacactaaaaacacttaagaaactacacctaagttttgtcctttattttatagtaactttgttcataaagttactagaatgatcaataaactacaaatttgtggttgaataggaactgagacgtttcccaactctccaagccgaaatagcagcagctacaaatgaggctttagagaggttccgcgaagagagtaagaagacagctatgcggcttgtggacatggaagcttcctatctcactgtgg

SEQ ID NO: 18950 - DNA, 419 bp, Glycine max
  unsure at all n locations
tgtatacatgaatttgattnttatgatgctcanaacctatatgttgggaaacataaacttcatcttcagtgatccatttagggaaacactcttgacatccatttggtctaactntaaatccataacataagcataagtagtaatcttaccacttctagtctagctatcggtgcataagcttaaccaaagactatactgttttgttggttatagctcttgactactatccttgccttattcctagtgatcaaaccatgttcattcaatttatttttaaacactcatttagtgtaaatgatgttcatgtttttaaaataaggtattaattcccatatatcatttcttttaaattggttcaactcctcatgcatggacatcatccagaacttacatttgagtgcctcttctatagacaatgg

SEQ ID NO: 18951 - DNA, 391 bp, Glycine max
  unsure at all n locations
agcttgagtgcttntgctgcaggacaagctgcagcctttaagatgtttgaaacaattaaaaggaagccagaaattgatgcttatgacactactggtcggcagcttgatgacatccgtggagatatagaacttagggaggtttgctttagttatcctactagacctgatgaactgatattcaatggattntctctttcaataccaagcggcactacaacagctttggtaggagaaagtgggagtgggaaatccacagttgttggtttgatagagagattttatgatccacaggcaggtgaagttctcattgacagtatcaacctcaaagaattcaaactgaaatggatcagacagaanataggcctagttagccaggaaccagttctcttta

SEQ ID NO: 18952 - DNA, 384 bp, Glycine max
agcttattcttgtctgaggcatcttccaagtcaatatctttttcttccttgagttcatcatatatccaaaacggaaagtaatcattgcttgaaagttgatctggaagaggatctgagttcctccttctacttgccatttccatcaaaagctttccaaaactataaacgtcggccttatatgatactccaccaatatttttgtagtataattctggagctatgtagcccaaagttccaattgcttcaggtaaaacaagagacctatctttcacaggatgtagctttgcaagtccaaaatctgaaacctttgggatgaagctctcatctagaagaatattgtgtggcttgatatcaaaatgtagaatttgcacatcacaaccttca

SEQ ID NO: 18953 - DNA, 396 bp, Glycine max
agcttgttaatccatggaagctcctaatatctcccacactttttggggtgggtcattcttggatggccttgattttctcaggttccacttggaacccatttctaccaactacaaaacctaagaaaactatattatctacacaaaaggtacacttctctatatttgcatagagggtgtttttcctaaggattgaaagaacttgcctgagatgtcctaagtgatcatctaggctcctactgtacactaaaatatcatcaaaataaacaactacaaatctacctatgaaatcccttaagacataatgcataagcctcataaaggtgcttggtgcattagtgagcccaaaaggcatcactagccattcatacaaaccaaacttggtcttgaaagcgtttt

SEQ ID NO: 18954 - DNA, 270 bp, Glycine max
taatatcccccacactttttggagtgggccattcttggatggcctcgattatctcaggttccacttggaacccatttctaccatctacaaaacctaagaatactatattatctacacaaaaggtacactcctctatatctgcatagaaggtgttcttcctaaggattgaaagaacttgcctgagatgtcctaagtgatcatctaagctcctactgtacactaaaatatcatcaaaataaacaactacaaatctacctatgaaatccctta

SEQ ID NO: 18955 - DNA, 389 bp, Glycine max
agcttcttagtttcagatgatgcagatgggtttgtagctacctcatgcactcctctaatgactatggcatcatttctggcgctaaactgctgggagttggaggccatcttctcaattaaatttctggcttcagtaggagtcatgtctccaagggctccaccactggcagcatctatcatacttctctccatattactgagtccttcataaaaatattggagaagaagctgttctgaaatctgatggtgggggcaactggcacatagtttcttaaatctctcccagtactcatacaggctctctccactgagttgtctaatacctgagatatccttcctgatggctgtggtcctggaagcagggaaaattttttctaagaatactctctt

SEQ ID NO: 18956 - DNA, 429 bp, Glycine max
tcaagaataatggtctcatcaaactatttatttctcgaagggaattctataaataggcctcctatttttaatggcatgggttaccattattggaaaacccgcatgcaaatttgtatagaggctatagatttgaatatctgggaagccacagaaattaggtcctacattcccactatggttgcaggaaatacacccatagaaaaacctagggaagaatggagtgaggaggaaaagaaattagtttaatacaatttaaaattcaaaaatataattacatatgctttaggaatggatgaatactttagggtatcaaattataaaaatgcaaaagatatgtgggataccctacaggtaacacatgaagatacaacatatgtaaaaagatctaggataaatacattgacacatgaatatgaattatttagaatg

SEQ ID NO: 18957 - DNA, 412 bp, Glycine max
agttggggtcacttataatttaactcattgatttgtcaagaaaactattggaaaaacgagagtgtgtaatgatttttgttttttgtcttgtatgaacatcctatagtaaaatttacatttctctctatatgattaactttggattttgagtcataccttatccaaaactaggcatacatgactttttatactggtaaagtttataaaattttgttatatgataagtataagttatgcaatagttttataagtactctatagaaggaaaaaaatgtaaacttgagttttaatataaatttttaatcagataaatatatttatgtataaatttggtttgggttggattagattgaattttaaaatgaaatccaaaatctgattctatccaaaacatatgagtttgttaaatttt

SEQ ID NO: 18958 - DNA, 372 bp, Glycine max
  unsure at all n locations
tgcacacaagtttctccttgcctagcacttcanaaccttctggttgggtcatataaatgtcttcctctaaatccccatgcaagaatgcagttntaacatctaactattccaagtgaagattctttgtagctacaatgcttagaataactctgatggtagtcatctttacaattggagagaaaatctctatgaaatcaattccttgtttttgctgaaatcctttcaccataagtctcgccttgtatcttcttctaccatcaaattcttcctttagcctatagacccacttattctgtaaagctttctttccttctagcaatttaattaaagaccacatcttattcttctgaagggatgtcatctcatctttca

SEQ ID NO: 18959 - DNA, 403 bp, Glycine max
tatgctacaaacatttataatagaccctctcagtagcattaccaacaacagcagaataattatgatctttcaagcaacagatataatctaggttggaagaatcatccaaatctgagatgggcaagtcctccacaataacaacagcctatccctcctttccagaatgttgttggtccaagcaagccatatgttcctcctccaatgcagcagcagacaacaagcagctgaggccccttctcaaccttccttggaggagttagtgaggcaaatgaccatctagaatatgcaatttcagcaagagacaagagcctccattcagagtctaacaaatcagatggggatgatggctactcagttgaaccaagcttagtcccaaaattctgacaaatttccttcacaaact

SEQ ID NO: 18960 - DNA, 339 bp, Glycine max
  unsure at all n locations
tatgaccattcgaatttctcgagagtttccgttgttcaatttcgagcgtgtagatgagttatgtccccgaatcggacatctgtgtgaaaagttatgaccattcgattttctcgagagcttccgttgttcaatttcgagcgtctcgatatattatgaccccgaatcggacatctgtgtgaaaacgtatgaccattcgattctctcgagagcttccgttgatcaatttcgagcgtctagatgagttatgttcccgaatcggacattcgagtgaaaacttatgaccattcgaatttctcgagagcttnncgtggtcaattttcgagcgtctcgatatataat

SEQ ID NO: 18961 - DNA, 294 bp, Glycine max
acttatcacacggaagtccgattggagtgcataatatatcgagaccctcaatattgcaaaaggtagtcctaatgaaagataaatggggataactttttaaacggaagtctcaattcaagtgcatacaatattcggaagctcgaaaatgaacaatggatgctttcgagaaaattaaatggtcataacttatcacacggaagtccgatttaggcgcataatataccgagacgctcgatattgcaactcggaagcactcaagaaattcatgtggtgataacttatcacacggaagtc

SEQ ID NO: 18962 - DNA, 384 bp, Glycine max
  unsure at all n locations
gcactcagctatgtaggcaatcgtgatctttgtgggcctccacttaccaaaatatgtttccagggtggtaaacctaacaacacagagccaatagatgaagatggagatgagtttgcatttttgtcgtggctttacattggaatagaatctggatttgccacgggctttttgggattttgttgtgtcattttcttaatcagaaaatggaggcatgcatacttcaagtttctttatgacttgaaagaccaactttatgtcatggtggccatcaaaatgaattcttttcgttgaggtcggacacaaccatactggtaagtaaaacctttgattagttgaaatttcngtttttattatacaagataaacatagaccatattttaacat

SEQ ID NO: 18963 - DNA, 433 bp, Glycine max
  unsure at all n locations
tgtgcatccaataccctgatgaggatgtcccatatgttcttaaaactggactaattcatttgcttccaaagtttcatggccttgtaggtgaagacccgcacaaacatttgaaggaatttcatattgtctgctccaccatgaaacccccagatgtccaagaggaccacatatttctgaaggcttttcctcattcattagagggagtggcaaaggactggctgtattaccttgctccaaggtccatcacgagctgggatgaccttaagagagtattcttagaaaaaattttccctgcttccaggaccacagccatcaggaaggatatctcaggtattagacaactcagtggagagagcctgtatgagtactgngagagatttaagaaactatgtgccagttgccctcaccatcagaattcagaacagcttcttct

SEQ ID NO: 18964 - DNA, 397 bp, Glycine max
agcttgtattatagttaagagtcatcgagtcactataccattaactatgaaaaaaagtaatgatccttttgctttaatccattatgacgtatggcgtccatccccaaaatcttctatatatgggtatagatggatagcgatatttgttgatgattgcactccaacgacacgtattgacttgatgaaacaaggatatgatgtggtacacatacttgaacaatctcatactatgattcaaactcaatattcaaagaagactacgatccttcgctctgataccatgtataactgatatgatatttgcatatatctcaatcgcatcttacaaacggaaatatgttatatgtatatacacagacaaccctatgtctaattataactagatcacgataattat

SEQ ID NO: 18965 - DNA, 431 bp, Glycine max
  unsure at all n locations
tttctttcttttgaggatgagaccagtctttatccccaaatacatgggttttatttctaatatcaacccaactataacctggctacttgttcatgttgctaatttttatcatcttcctcaaacttcgtacatcttcccattgctactcttttgcgtaaatatttgaaagccaaacatgagccacactatttttaggttcagccttcatcaatttgtctgctgcaagattggccctttccatgtccccatgaattttacaagccccaagaaaagaacaccagccaaagacatgttatttataaagtcttctgcttctttaagctttccagctctacctagcaaatcaatagcacaactgtaatgctcttctntagggactaccccataaatcttttcatggaattaaagtagttatacccgtcctcaaccat

SEQ ID NO: 18966 - DNA, 383 bp, Glycine max
agcttgattgcaagttgctttgtctatatgcatcttaattcttctagatcccatcctaccattacaccaagtgagactagatccccttgaacagaggtgggtgagatcattctagacagaccaattggaaaaatcttcacaagattgcttgaggggaaggtagccaccaattctttcatgtgcccctgaaaccgcattgaaatcaccaatgtaaacccaaggtccaaggaagttgatcagcatagaagagagctcatgccataagattgctcttttaatgttggaggtggaaccataaatagtagctacataacatgaaatgttgttaatagaaactacaaaagacatgctttgatcagagatagctaacatagacaaggaag

SEQ ID NO: 18967 - DNA, 393 bp, Glycine max
  unsure at all n locations
agctttgagcaaattgtaatgacaataactntatacacggatgtccggttgagtcccgtaagatatcgagacgctcaaaatttagatccgaagctctgagaaaattgaattgacaataactntatacacggatgtccggttgagtcctgtaatatatcgagacgctgcaaattgaaaacggaagctcgtaggacattcaaacgacaataactttntactcggatgttcgattgaatcgggtaatatatcgagacgatcaaaattgagactagaagctctgagcaaattgagatgacaataactttatacactgatgtgcggctgagtcccgtgatatatcgagacgctcaaaatttagatccgaagctctgagagaattgaattgacaataac

SEQ ID NO: 18968 - DNA, 424 bp, Glycine max
tgaactatcaggaaggatggtggtctaatttgtagaacttttataattcgacatctagtacgaaccctatggtccgatgaagacacaactcatggtagacttcctggaagaattcgttgggaatgaccaaaccaccccagactggtggagcttctacgttgacggtgcatccaacgtgaaggggagtagggcatgaatcatctttgaaggccctggaaatgtcactctaaagcaagcccttaaatttaacttcaaagcctcaaacaatcaggccgagtacgaggcactcattgcaggtctaaaactagcaacaaaagttggggccataaagctctgatgctacacggactcgcatcttgtccaggggcaggttgccaactgataccagaccaaagagacaatgttgctcaagtactaccacatt

SEQ ID NO: 18969 - DNA, 386 bp, Glycine max
  unsure at all n locations
agcttcccatctctagcatccctcttgaacttcaaatcatactgatggaacttccatatgtacttcaatttcctcagattcctatagaacagagttgtgggtatgttctgaaagtaaatcccaaagtctaggccattctcatgcagagaatcaaagatggttttttgaggatacccttttgctaactgcctcttgatatgacttgttgaaccatgagaggttgctgagtacacaaaaagcctattgggttgtgttggaccaggaattgaagaanaccacctgtcaaaaacagcaaattccttaaccaaagcagcataaatcggcacagagtccggtttaaaccctttcatgacagtctcagagaggttgggagacatagacaatgc

SEQ ID NO: 18970 - DNA, 393 bp, Glycine max
tgtaaccgaggcatgctagacggtctttatatttacaagaaatccttccattgtaagcacaccacatatgaatgagtttatttttggaaatatcatcattaatgataaaaataaagatctatggacatacaaacaccatatatatacgcactgtaaacggccaagactttagctgatacaagtgtcatcttctatactctccctctctttctttatatatatgctgccagattgctcacttcgcaaacaaagaacattaatgtccgcttcatataaacaaactgttcactctgctgctgcttctatggacagttaccaaatctctacattttctcgttactcttcttaccctgtaatcattcttcacggacttccgaacccggacacttttcc

SEQ ID NO: 18971 - DNA, 401 bp, Glycine max
agcttcaaatctagcttttggaagagcttttgttaaaatatctgcactttgatcttcagttctgcagtaaattagtttggcttcaccttctctctgtgcttcccttaaaaaaaaacttgatcttgaaatgcttagtcctgccataaaaaacaggattatttgaaatggaaatagctacttgattatcaacaagaatctgtgtaggctccttttgttccatatgtaaatcagcaagtatacgccttagccaaataacttgattcacaactgcagtggctgtcatatatactgcagtgcttgtagcctttgtccacagcttctttggcaactcctttttatacaacatacaccttgtcatcttcatgatatttctattttcttctctcacttgtaccattcta

SEQ ID NO: 18972 - DNA, 416 bp, Glycine max
tgttgaaactaaggatggaatagtgatgcaccagaagaagttcatttaagattgtttgaagaggttcaacatggatcaatgtaataatgtagatatttccgtggaaggaaatatgatactggatacaggcgatcatgaagcttcagtagatgccacattgttcaagaagctagtgggatgcttgagattcgtctaccatagtagaccagaaatctcatatggatttggtcttggcagcagattcatgagtaatccaaaacagtctcatttggcagcagcaaatagaatcttgagatatctaaaaggaacacttaattatggcatattggttcctcatcagacagaaaaatgtgagctatacctcgtagcttattctgactcatactggtgagggggataagtggagagaagatcta

SEQ ID NO: 18973 - DNA, 329 bp, Glycine max
aaatcagccattattgaaccattatgaactctccaaccaccgggaccatctccggtggaagaatcattccaaacaacagcaacaacaatcttattttcaaaatgctattggcccaagcagaacatacatttcttcaccaatccagcaacaacaacagcaaccgccccagaaacagcaaacaggtgaagctccttcgcaaccttcccttgaagaacttgtgaggcaaatgactatgccaaacatgcagtttcaacaagagaccagagccttcattcaaagcttaactaatcagatgggacacatggctacacagttaaatcaacaacagt

SEQ ID NO: 18974 - DNA, 315 bp, Glycine max
  unsure at all n locations
ccttgtccgaaaagtcacttanaaccattttaaggtccaacgccttanaacggtcctctttgcttttatcgattaacatggaccgttcaaaagcataagatcaacacataactttaccgcttttgcaagaactatgtaggtctgagttcctcatcacanatcgaggatacgtangagcaaaagccccgcttttgtcgaccaccccaagagatcgttaatggtccaacgccttaacgtttctctcctttcaaaaaccaagagatcgttaatggtccaacgccttaacgtttctcttctttcaaaatcaaaagatca

SEQ ID NO: 18975 - DNA, 439 bp, Glycine max
tataaaactcagctttacatggatgtccgattcggtgacataatatatcgagacgctcgaaatcgaacaacggaagctctcgataaattcgaatggtcataacatttcactcggatgtccgattcggggacataatatatcgagacactcgaaattgaacaacggaagctctcatgatattcgaatgctcataacatttcacacggatgtccgattcggggacataacttatctagacgctcgaaattgaacaacggaagctctcgagaaattcgaatggtcataagatttcacacgaatgttcgattcggggacataatatatcgatacgctcgaaattgaacaaccgaagctctctagaaattcgaatggtcataacatttcactcggatgttcgaatcggggacataatatatcgagacgctcgaaattgaacaac

SEQ ID NO: 18976 - DNA, 325 bp, Glycine max
gatgatactgctaactctataattataaatcatgcttttgtattctaatatatttcacttcctgtatgctgcgcaaaatctcattcttactggtgtcaagtttcagaccttgcatgatgatgggactgtggaactatgggatatatccggtagctttgtgttttcagaaaatgatgttgggaaaatcatggcagcaacttctgttagtaactgcaagagctcacaatgcagtggttgtacaaagcttgactactcagctgactaatgagcacctttccaattttcaagtacctacttcctctgtctaatcttccctttcttttaa

SEQ ID NO: 18977 - DNA, 435 bp, Glycine max
  unsure at all n locations
agctcacattttnctttattctgnnnctttnggagctgncaaatgattggttgtaatccttttatgtagttatgtactatgcataatgccaaaggacaagtcatactattcagttttcaaaaggaataaccttaaacgtgcatcctatattgcattgnggtggggtggttaagtaggaaagagaaacataataaatacaaaaatatgataaagggatataatgaaataaaaaatgttaatacacattnttatgtatttttattattgattaaaatttattanaacgttagagattctatntattgttaaatgtatntaactcataattctattattnttaanaagttttaattaacaataaagaatattttaaaataatatatggatctttnttcacaataacaacaatgaaattcanacttaanatttcatgct

SEQ ID NO: 18978 - DNA, 414 bp, Glycine max
  unsure at all n locations
ttgaaaatataatatcttgatttctaaaatacccattgtctctccctctttgtaaacatcaaaaaggccaaagtgcgcaaaacatgaataatttaatcatacacaaagcataatttgtaaaacaaacatataagattctgatacatacataaagaaaaacatgaataaaaccaaattgaaatgcaaaccacttagtcatataacacanaccataaatatcatgttcagtcatactaagcaaatattaaaagaaatactaagttttcaaatgtcataataatatagccaaatacacggctagaaaacaaaatactaataataatagtaatgtctaaactgatagtggtggtggagggaaattaatgtagtcacgaatgatggtgaaatcttcttcaacctttgtgatccttgagt

SEQ ID NO: 18979 - DNA, 418 bp, Glycine max
aatcttatccaatatatgatatgtgccatgatacgaaccatattactatagtgagatggtagtgactacgatgatagtgacaatggtggtgatagttacactgacaataatggtgatgacactagtagcgatagttacagtaacaataatggtggtgacattagtagtgatgatggctgcgacaacgacaatggtaatgagtgatagcagcgataatggtggtgtttcttatggcgacaatggtggtggtgatgatggtggtaatgatggtggtgacaatagtagtaatggtgatggttaggatggtgacaatgatgacgacaatgatagtgatgagtggtgagacactggtggtgactatgatggatatgatggtggagacaattgacgagtgacaatgatgtgatggggttattat

SEQ ID NO: 18980 - DNA, 439 bp, Glycine max
  unsure at all n locations
tggaacanatatattgagctcttggtccccttagagattgtgtaaatatgtctcctactttatcattagaactaacgaattcagtaataacttccttagaaagaactttctcctggacaaaatgacaatcaatctcaatatgtttaattctctcatggaatactggattaaaagctatatgtacggctgcctgattatcacagcatagcttcatttgttgagtatctccaaacttcaattcttcgaagaagttgtttaatccanatgagctcacaagtggctacagccatagctctatattcagcctctgcactagacctttgcacaacatttgcttcttactctttcatgagacaagaatttctccaacagacacacaatatgttgaagtggacgcctatcnatggtgatcctgccatctgcttgcaaatccactatt

SEQ ID NO: 18981 - DNA, 294 bp, Glycine max
cttcatcaatggagtcctttgcttcttgaagatcaatgacagtggaatgcaaaaggaggaaaggtgattggagatgccacttcaaggagaagagagtcaagaacaagttcaccaccatatgaagccatggataagagcttgaaagttggagaaaatgagtggagggagagggagagaatgggcacgaaatttatgcctcgaatgaagtctaaaatttgaagtgtaatttctcaaatgatcaaagtagaaataatgcacacaaaaagcctctatttatagcctaagtgtcacatg

SEQ ID NO: 18982 - DNA, 432 bp, Glycine max
  unsure at all n locations
tgcatgatttacatctccctctntctcaagcaaattcttcttgatatcatcaaaatcttcatgatttattaaagaatttgaaaataaagattttgaattattttgtgatgaacatggtattgaacataatttttctgcaccaagaactcctcaacaaaatggagttgttgagaggaaaaataggtcattggaagaaattgcaagaactttattaaatgatacttctcttncaagtatttttgggctgaagctgtcaatactgcatgttacatcatgaatagagccttgataagacctattntaaagaanaccccatatgagttatttaacggtagaaaacctaatatttctcatctacatgtttttgggtgcaaagtgcttgtacttaataatggtaaagataatctangaaaattcgatgcanaatctgat

SEQ ID NO: 18983 - DNA, 413 bp, Glycine max
  unsure at all n locations
tgtcaaagaatccaacctctcatggtagaagcaaacacatagaaacaagatttcactatcttagggatcaagtgaacaaagagaaactgaaagtggagtactgctacacatttgatcaacttgctgatattttaaccaaacccctcaaaggggagaggtttaaaaatgtaaggggcataattggcttgatgaacttangagatcagaataagggagggtgtgagagtttaattnttgtttgtgtggggtagaattgtttgtgctttgaatataagagagagtaacagaatttttaaattcttgtataagtactagcctaagtgtgagnggttatttactctgttttgcttgtataaanggcatacatacatcttaataaagaggatttattcattctatcattttcagtctct

SEQ ID NO: 18984 - DNA, 303 bp, Glycine max
  unsure at all n locations
tgaaattgatcaacggaagctctcgagatattcanatggtcatatcttttgacaagaaggtcagattcaggcacataatatatcgagacgctcgaaattaaatagcggaagctgtcgagatattcanatgctcattacttttcactcggaggtccgagtcgagcgcataatatatcgagatgctcgaaattgaacaacggaagctctcgagaaattcacatggtcataactgttgacacggaggtcagcttcacgcgcataatatattgagacgctcgatattgaacaacagaagctctcgag

SEQ ID NO: 18985 - DNA, 391 bp, Glycine max
  unsure at all n locations
tatgcatccaataccctgatgaggatgtcccatatgttcttaaaactggactgattcatttgcttccaaagtttcatggccttgcaagtgaagacccgcacaaacatttgaaagaatttcacattgtctgctcaaccatgaaacccccagatgtccaagaggatcacatatttctgaaggcttttcctcattcattagagggagtggcaaaagactggctgtattaccttgctccaaggtccatcacgagctgggatgaccttaagagagtattcttagaaaaaattnntcctgcttccaggaccacagccatcangaaggatatctcaggtattagacaactcagtggagagagcctgtatgagtactgggagagattaagaaactatgt

SEQ ID NO: 18986 - DNA, 363 bp, Glycine max
  unsure at all n locations
aaataagccctccatcagtgggaccttaagcttcattggataatttcttcatttggttatgatgaaaaccccatggatcaatgcatataccacaaggtcaatgagagtaaaatatgttttcttgtttcatatgtagatgatattntacttgcagtcaataatcagggtttgctaaatgaggtgaaacaatttctctctaagaattttgacatgaaggatatgggtgatgtatcttatgtcattgacattaatattcatagagataaacctcgaggtattgtaggtctatcacatgaaatctatattaacaacaatttagagagatttangatganagaatgctcaccaagtgtcgctcccatt

SEQ ID NO: 18987 - DNA, 380 bp, Glycine max
  unsure at all n locations
agctttgaatttactattcaatggagttgacaagaacatcttcagactgatcaacacttgcacagtggccanagatgcatgggagatcctgaaaatcactcatgaaggaacctccaaagtgaagatttccagattgcaactcttggctacaaaattcgaacatctgaagatgaaggaggaagagtgtattcatgacttccacatgaacattcttgacattgccaatgcttgcactgccttgngagagaggataacagatgaaaagctggtgagaaagatcctcagatccttgcctaagagatttgacatganagtcactgcaatagaggaggcccaagacattngcaacatgagagtagatgaactcattggttctcttc

SEQ ID NO: 18988 - DNA, 409 bp, Glycine max
  unsure at all n locations
agcttatgagttatctaatcaagattcttgattgctcttaaagttgtaacatgtggtctgactagtctccactttctaggtaaacttcgtaagattttatcaacatgatcataattatcataatgtatacctagagagcggagctcgttcagaatgatttggaagtttccaaacatggtttgaatatcttctccctcttccatattaaagagttcatacttatgtgtcagaaggctcaacttgttacgttntacgttagaggacccttcgtaggtaatggataaggtatcccacatttgtttggcgcttttgaagttgtgaactttggaatattcttgcgcgttagttgataagaaatatagacttatgatcatccatccatttgtccttggggatcttgttcttctga

SEQ ID NO: 18989 - DNA, 388 bp, Glycine max
  unsure at all n locations
ttacgaagctntctgggccttgcgggcttttataggagatttatcaaggggtatgcttcgatagcttccccattggtggcagcaaccacggtggagcctttccagtggaccgcggcggctcagctcgcatttgacctcttgaagaaagccttgttcgaaaccccggtacttgccttgccgaatttctagctaccatttacagtcgagaccaatgcttctggggtgggcatgggtgcaatcctctcttagcagggccacacaattgcatattttagcaagccatttttgcctaagcttcaacgatcgtccacttatgtccgagaattgttcgcagtgatggcggcggtcaagaaatggtggcaatacctcctcggtaaccggttcatca

SEQ ID NO: 18990 - DNA, 445 bp, Glycine max
  unsure at all n locations
tctaatttactacattcatgcaagacttaattggtttcctttnttaacaaattgaacattttgtaaagacaagggcttaattataattgaaaaaaagaagattgtgtttaattaattaattaccaaaggtgaaggagctgaacattatgcctaaagaatcagagagctctcggtaactcttgtacatcttcaagtccactttgcgaaggtaaggtgctccatccatgctaactttgacaaagcttgcattagggctgctgttcttctcgctctcttctccaacgctcttttgcacagccaacatgttcttccggaaggaccgcacaggtggccaacccaccacctgcgtcctacacatttcaactcatcaatatcactctatatattatgatcaattaatacgcatcatgaacatatatggcaatcatataacgaagttaaaata

SEQ ID NO: 18991 - DNA, 333 bp, Glycine max
  unsure at all n locations
ctaaaaaatcctatatttctagggtaccctacctatattatggagccctaaatacaaggcccaaaaataatgaaaccttaatctaatatttacaaaagatagtgggctcgtacttagcccatgggcccaaaatctaccctaaggctcataaaaaccctagggccttctcttgcatctctggcccaatctacttggagtttctatccaatgcccttgcggngtaagattgcatcattccctccccctagaagaggatttgacctcaaatcccgaggctcttgaactttgggctttttttctcacactatanaagaacaaaacatatgtatagtg

SEQ ID NO: 18992 - DNA, 307 bp, Glycine max
  unsure at all n locations
tggaaaccaacatttaagatatgataagattgttagtttaaggtaatgattgaaattaaatttaaaaatatattcgattttatagttataaaaaatattgtaacctacatttaaatttagactattatcagattgctagtgtaagataatgattgaaatcaaatttaacaatatattacatttggtagttataaaaaatattgaaaccaaaatttaagatttanaatatatctattaattcatatgttctaattnttttacgagtatgtttttagagnaaaaaattcatttaatttatttacaaaat

SEQ ID NO: 18993 - DNA, 462 bp, Glycine max
  unsure at all n locations
agcccanncgttaggccttaattttgggaacaatcncgngnattggcaaagaagacatcatatgccaagggaacaatttcctcctatcactggaggtatatacctaggttaagagcgaggttgattcatatttctaaaaatttgagacaaaagttgacctaatacgcttctacaatcttgtcaagataagttgcatcgaggatgatgaagtcgtccctatatacttgtaaggtctcaataactatatatacccccgaaagaaaactacttctttgacaaagacggtgttgcactattagaaattacactttcaacatcggttatttagggcattctacatcggctctaanaccgatgttgaaagtgatgatgttgaatgtatcatcgttaacatcggtttttaaaaaccgatgttaacatanatatgataacatcggttttctaaataatcgatgtaaacac

SEQ ID NO: 18994 - DNA, 386 bp, Glycine max
  unsure at all n locations
accataagagccttagatattngttngatcaaaaagagcttaacatgaggcagaggagatggttagagttcctttaagattacgattttgagcttagctatcatccaggtaaagccaatgtagtagctgatgccttaagtagaanatcccttcaaatgtctgctttgatggttagagacttggatctcttanagcagtttagagacatgagtttggcatgtgagatcacctctaatagcattaagttgggtatgttgagagtcaccagcgaactcttgagcgagattcgcgagggtcagaagtctgacccattcttgtcaactcagttagagtccatagtcgcanggagagagagtatttttagagtggctactgatggagtcttg

SEQ ID NO: 18995 - DNA, 406 bp, Glycine max
  unsure at all n locations
nttgttttcaatgacgagcgtctcgaaatcctacgggacactattggacatccgagtgaaaagttattgtcgtttgaatttgtttagagcttatgttttcaattacgagcgttttgatatcccacgggacacaatcggaaatccgagttaaaagttattgtcgttagaattttctcatagcttccgttttcaattacgagcgtctcgatatcctacgggacacaatcgaacatccgagtcaaaagttattgtcgtttgaatttgctcagagcttcagttttcaattacgagcgtctggatatattacaagactcaatcagacatccgagttaaaagttattgtcgttngactnttcatagagcttctgttntcaattagagcgtcttcatatattacgagactata

SEQ ID NO: 18996 - DNA, 399 bp, Glycine max
  unsure at all n locations
ttatcattttactanattcaaattgncataacatttcactcagatgtctgattcggagacataatatatcgatatgctagaaattgaacaacggatgccctcgggaaatttgaatggtcataacgtttcacaccgatgtccgattcggggacataatatatcgagatgctcgaaattgaacagcggaagctgtccagaaattcgaatggtcctaacttttcacacagaagaccgattcggggacataatatatcgagacgctcgaaattgaacaacggaagctctcgacaaagtcgaatggtcataacttttcacacgatgtccgattcgcagacataactcatctaaacgctccaaattgaacaacggaagcaatcgacaaatttgaatggaataaca

SEQ ID NO: 18997 - DNA, 306 bp, Glycine max
  unsure at all n locations
ntgaccattcgaatttcgagagtgcttccgttgttcaagttcgagcgtgtcgatattttatgtccacgaatcagacatccgagtgaaatgttatgaccattcgaatntgtcgagagcttccgttgttcaatttcgagcgtctcgatatattatgtccccgaatcgaacatctaagtgaaatgttatcaccattcgaatttctcgatagcttctgttgttcaatttcgagcgtctagatgagttatgtacccgattcgaacatccgagtgaaatggtatgaccattcgaatttctcgagagcttccg

SEQ ID NO: 18998 - DNA, 411 bp, Glycine max
  unsure at all n locations
agcnngnncattttctttatcccatnngaactntnnggnctttntcagtaagttcatgatcggcctagccttctcagctatccaaggtagaaatcttatcaaagaggctatgcgtcctgtgagtctttgtatctctttgaaagtcttcggactcctcatctcaatgacgacttgacatttatctagattagcttgtatgcctctttgggaaagcataaaaccaaaaaattntcctcctccaatcccaagaacacatttttagaggttaagtcgtatgtatgtttttggatttgtgaaatgatctcggctaggtcctcaacatgggacttgactccatnggatntgaccactatctcatcaacgtacacctctatatttctacgaatnntatctttgaagatcttatccatg

SEQ ID NO: 18999 - DNA, 248 bp, Glycine max
tacccagctggccttgaatcagatatccgtgcctatcgcaaaggtttgtgggttgtgctcctttggtgaccaccatacagacctttgcccttccatgcagcaacctggagcaattgagcagcctgaaacttatgctgcaaatatttacaataaacctcctcaacctcatcagcaaaatcaaccatagcagaacaattatgacctcttcagcaacagatataaccctggatggaggaatcaccctaacc

SEQ ID NO: 19000 - DNA, 433 bp, Glycine max
  unsure at all n locations
agctttacaattttgttttaaatccaagcccataaataatataaaatctagataagataagataagatctagatgaaataatatctagatgagatcaaatctagataagataagataagataagatctagatgaaataatatctagatgagatcaaatctaaataatatctagatgagataaaatctagataagataagatctgatagaataaaattgtctgctcttttcaagtccaagcccaattccggattcaagcccaattgcttataattctcctgaaattaaatcanaaacacaaaattagtccagtaggtccaattgataaaactgcatattanattgacaattaagcctaatcagtaattaaaatgatgacaaaaagggttaagaaatatgagaaaatgatgacacatcanatcccctcacactta

SEQ ID NO: 19001 - DNA, 294 bp, Glycine max
tatagcttactgattatccacaaaaagcttcactgcatcactatccttgattcttaattcttgtaataatgtgtccaacgagacagctaggcaagcactcattgtagctggaacatacttagcttcacatgttgataaagccactatggattgcttcttagaactccatgatattggtgttgcaccatacatgaatatgtaacctatagaactctttctgtcatctctgtctcctccccaatccgcatcaatatatcccactaattcctctgagctgatgctgtctatatttgg

SEQ ID NO: 19002 - DNA, 273 bp, Glycine max
  unsure at all n locations
attttctcaaggaaacctggattaccttttctttctcgggctcttcagcattgctcaaagaaccttctgatactttccccttttgtgattgtaacataaccatcntctacaattaacctgcaatgtacacactgttgacccttcaacgaatgagctntaacagaaagttcagtacagcgtccatctaatctccaagctcggagggtaacaaaacatgcactcanaccaccaagatccangccactggctcgaacacatncattcaatccaaca

SEQ ID NO: 19003 - DNA, 461 bp, Glycine max
  unsure at all n locations
caagcttgatcttttattctatatctgacagccaatgggtgagtcccgtccaggtagtcccgaagaanaccggcctcatcatgataaaaaatgagaaggaggagctgattcctattcgggtgcagaacaggtagagagtctgcattgactataggaggttgaaccaggtcaccaaaaaggaccattttcccctgccattcattgaccagatgcttgaatgcctggcaggtaaatctcactactgtttccttgatggttnttctggctatatgcaaatcactattactcctgaggatcacgacaacaccacattcaccagccccttcggaactttggcctatagaaggatgcctttcggcctgtgcaatgcccctggtaccttcaagcggagcatgattagtattttcagtgattttgtagacnattcatagaggtgttatggatgatntcactgatatgtg

SEQ ID NO: 19004 - DNA, 417 bp, Glycine max
  unsure at all n locations
tgtcgaccttgctctagcctctggagaaatttttgaaggagaatgtttcaagtacataaaggaatgttntgaaaatggcacattgcatctcattgggctactgagtgatggtggagttcactccagacttgatcagttgcaggtgattatttggggttggagctgtttttccttcatgtgtattcagtttattctttctaactaactacttttgtacagttgttgcttaaaggagttagtgagcgaggtgttaaaagagtccgtgtccatattcttacagatggccgtgatgttctggatggctcaagtgtggggtttgtggaaaccctttgaaaatgatcttgcaaactcgcgcgcanaaggtgtcgatgctaggatagcatcacgtggaggtcgtatgaatgtcacaatggatcg

SEQ ID NO: 19005 - DNA, 429 bp, Glycine max
  unsure at all n locations
agcttgacatttatctggttcgcatngngnagcagattgatagcgtgatctgtggatcgagatggcggaaggtttgtaagtggttgaaacaggcatgagtatttcgtaagtaactcagaaatctcgggtaagatgggtggtgttgtagctgattgtgtgtttgtttccactctaatatggaagaaggtgctagaggggctcctatgtagaagacgacgcagttgcgagggagacacgggttcacctatttgctcacgttccccctgtaactccacaagcttaccctcagtgatgaatttcatggatggagacgtgtagtctgtcagaaccggtcctaatgttntgagccattcgactcccagaactacatctgtgccacataagggtaggatgtgaaagtccaccatgaacgtatgctcctgcacctgt

SEQ ID NO: 19006 - DNA, 441 bp, Glycine max
  unsure at all n locations
tgtttacacctaaatacaatcatggtattnatactataaattaagattatattctaacattggaaaatttttacataattatctaatcataattggaaaatttttacataattatctaatcataattggaaaaattctacataattatctagtcataattcattatatatagcataaattttttgacttttaaaataatttaaacagttatttaattatataattaaatgataatataaaaatatttcacattgtatcagcattaacctcctgcttccggcttttgtgtacaacatggagtctttaattttccatcgattatgcggctgatactttgccacacataaatgtataagaaatatctttcagatgttgactagtagttgattcattattttacgggtccagattattctgaacatccattccactggtgcaatg

SEQ ID NO: 19007 - DNA, 276 bp, Glycine max
acaacgagatgatgcgctccatgagagggtggatcaaatggagaatagagatcataatgaagaagaaaggaggagaagagggaatgatggtgttcctagacaaaaccgaattgatggtattaaactcaacattcctccatttaaaggaaagaatgatccggaggcctacttggagagggagatgaaaatagagcatgttttctcatgcaacaactatgaggaggaccaaaaggtgaagcttgccgccacggagttttccgactatgctcttgtgtg

SEQ ID NO: 19008 - DNA, 439 bp, Glycine max
  unsure at all n locations
agcttgngtgtcntgtttataacttcacaagagatatttgaaaaaggtattacaaccatttctctatctctttctcttatttntatatccttatgttttcatatgataagaagaanaataaattgaattaagaaaaaaaattgatcataatgatttatccctttaggtataatacaataccaaaattgaaatatttatagcatattaggtctacaatttttattcttacaatcttaaaaaataatcattctcattatgtatgtcttcctagatccaatatgcaataaatatatcaattttagccttccaccatatctaaaggaataaaccatntaataataatgactatgcaattatatgtgaatgataaaattagtttgtgggtacataatcacttatanaaatcatacanttttatattttaatttaacctataaat

SEQ ID NO: 19009 - DNA, 314 bp, Glycine max
  unsure at all n locations
tgttgccattgaactcatgtgctacaaccaagccatgtttgggtttgcaccctatggtccttattggcgccaactaaaaaagattgtaaacttagaaatcctctccaatcgccgagtagagcaactacagcacgttcatgtctcagaagttcaaagttcaatcaaagagctcttcaatgtttggtcaagcaaaaagaatgagtctggctatgcgttggtggagttgaatcaatggttntctcatttgacattcaacacggttcttcgagtggtcgttggaaagcgacttttcngtgctacaactatgaatgatg

SEQ ID NO: 19010 - DNA, 385 bp, Glycine max
  unsure at all n locations
ttctaaatgataggctcagaatgcagaagaagtagcaatcaatttaataatgttctttatacatgcaagacaaaattgattgcaataataaatgagataagggaagagagaaatataaactcgatttatactggttcggccactccccgtgcctacgtctagttctcaagcaacccacttgagattntcctttctctttgtaaaacccttttacaaagtttgaaccacacagggacaacccatcccttgtgttcagaaattcttacaacttaagagaccctcagtctcttaatcaatctctttgattaagaagaagaagaagaagaattctctcttttaagagaaagataatacaatgaagttccataaactcttaatagatttg

SEQ ID NO: 19011 - DNA, 338 bp, Glycine max
tctgttctcaattacgaacgtctcgatatattacgggacacaatcggacacccgagttaaaagttattgtcgtttgaatttgctcagagcttctattgtcaattacgagcgtctcgatatattacgggactcaatcggacatccgagtaaaaagttattgtcgtctgaatttgctcaaagcttctgttttcaattacgagcgtcctgatatattacgtgactcaatcggacatccgagtcaaaagttattgtcggttgaatttgctcagagcttctgttttcaattacgagcgtctccatgtattacgagactcaatcggacatccgagtaaaaatta

SEQ ID NO: 19012 - DNA, 394 bp, Glycine max
  unsure at all n locations
aaatgtttcaaacttttatggtcagtgtaaaccacaaagggcctgcccaacagatagtgcctccagcgtggaatagctaacactaaagccatgagctccttttcatacgcagattttgataaatcgccctctgatcaagctatgctaactaaagctataggctgcctctgctgcatcaaaacagcaccaattcctctccccgccgcatcacattccacttcaaacagaatagagaaatcaggtaacactagtactggagctatagtcatgatctgcttcagatgattganagcctccagagcatcttttccccaaataaagttattcttcttagtcatttcagtcaacgggttagcaattgtaccataatcctttgataatttctgtataaccc

SEQ ID NO: 19013 - DNA, 323 bp, Glycine max
  unsure at all n locations
ccaaacgcacccttcttcaaacattcggtcgtaggacttgctataacgctaacattctggataaagcggcgattacatgatgcaagaccaaggaaagatctcacgctacgaactggtagaaggctcggccaagtcttgatagcatgcacttttgtttgatcaacggatactccatctttagacaccacatatccaagnacaccacactttcaaccaagaaagcacactnttccctcttgccatagagtnttcgggctcttagggtctcaaatatttggttcanatgagtgaaatgcccctctatagatntgctatacaccaat

SEQ ID NO: 19014 - DNA, 343 bp, Glycine max
tgtcctcggtgacgaagacaattgaataagccccttcgagcttttcacaggcgtcaacgattctcaaaatgaagggtctgtgtttggaagtggcgatgaggtggagaacaacctcggtgtcggaggtagtgttgaagatggacccgctgtcctcgaggttggttcggagggtgcggtagttgacgaggttgccgttgtgggccacgccgacggagccgaagcggtagccggcaacgaagggttgcacgtttttgagcatggattggccggcggtggagtagcggacgtggccgatggcgaggctgccggggagctggtccagcttcgactggttgaacacgtc

SEQ ID NO: 19015 - DNA, 236 bp, Glycine max
tctatagaaggttcgttcctaatttctctacaattgcatcacctctcaatgagctggtgaagaagaatgtggcatttacctggggtgaaaaacaagagcaagtctttgctttgctcaaagaaaagcttactaaggcacctgttctagctcttcctgactattctaagacttttgagctagaatgtgatgcctctggagtgggagttggaactgtattgttacaaggtgggcaccct

SEQ ID NO: 19016 - DNA, 401 bp, Glycine max
  unsure at all n locations
tgtcttataagctaaaatctacttatatacttaacttttatagatatcctctcatctaacttttccaaaagttgaagcaaataaattaatttaacttcttatagataaatttatccaggatgatcttgttatgtatttcttctttgggagattgtaagattatccttaacttacaatntgaatntatattctgaattatgtgagttatatataagtggtgttatgtttgataatggatttgtttattttagctctaaatatattnttattcttgtatcttttttagtctttataaaatatgtttattttatttttgtgttntagatagtactttgaacagtaaaaaatattctaaacaacgaaataaagactatttaaaacactttacagggacaaaaatg

SEQ ID NO: 19017 - DNA, 450 bp, Glycine max
  unsure at all n locations
tcttctccatttgatcacgcgatcttatatgatcatctccaccaccccaaaggaacctacgttgtatgcgcaccaatttgtccaccacccttatgggtaccctgaaaaaagaaaagaaataaattggaatagaggttaggattgattttataagagtgactcttcccccanaagatatgtgtctctgtttccactttgctagtttcctctcgtacttatagattattgngtcccacaactgacacctccttggatttgccccagtgggcatccccaagtaaacaaaagggatggacagcaggctacaattcaagtaattggctgcattntgcttccacgactccgacataccaatngatccgaatctgctttttgcannaattattgagacctgacaccaattcaaaggtcctcaagatggctttgatcaccctgatgttctncattgat

SEQ ID NO: 19018 - DNA, 411 bp, Glycine max
  unsure at all n locations
ttagcttttcntttcccttganacacnngagggacccgaggtcattatgaatgacaaattccttgtgataaaggtagtgttgccatgttttcacagcccatattaatgcatacaactccttatcataagtagaatagttcaaggtaggaccacttaacttttcactaccataagcaatcggatggccttcttgcatcaacacagcctcagtccccacattcgaagcatcacactcaatntcaaaagattgttgacagtcagacaacgcaagtatggaggcattagatagctntttcttaagaacattgaaagcatcttcttgattctctccccattcgaaaccaacattatgctagagcacgtcattgacaggtgctggcaatgtgctaaaatccttcacatatcatctat

SEQ ID NO: 19019 - DNA, 445 bp, Glycine max
  unsure at all n locations
gcttctatggaggctggctctgtgagcttcaatgaggtcctttttgttgatttttcaccatggatatgcagcggaagataaaggagaaaagctgataggaggcaccatccactagggaataagccatggaaaaaagagcttcaccaccaagagagtgtcttggataagaagattagagaggaagcttcattggaggaaaagaaagaaagagaaaggtgggggtgatgcaatcctacccnccaagggcattggatagaagactccaagaagattgggacaaagatgcaagagaatgccctanggttctcatgagccttanggcagatttcgggcccatgggctaagtatgagcccacttatctttgtatatattagactacgatgtcattatatttgatccttgtatttagggctccatattgtagatagggtaccctagaaatat

SEQ ID NO: 19020 - DNA, 343 bp, Glycine max
  unsure at all n locations
tgaataacggaagctcttgagaatttcaaatggtcataacttggcacactcgggtccgattcaagcttataatatatcgaagacgcctacaattaaacatcggaagctctcgagaaattcgaatggtcataattttccaaacggatgtccgaatccggcgcataatatgtctagacgctcgaaatcgaacaacgaaaactctcgagacattcatatggtcataacttttcctcggatgtccgattcagacgtatcacatatagagacgctcgtanatgcacatcggaagctcttgtgaaattacatggtcataacttttacacggatgtccgattcaggcgca

SEQ ID NO: 19021 - DNA, 413 bp, Glycine max
  unsure at all n locations
agcttttttgctctatttataggagctgacaagaatatcttcagacttatcaacacatgcacaggggccaaagatgcatgggagatcctgaaaaccactcatgaaggaacctccanagtgaagatgtccagattgcaactattggctacaaaattcgaaaatctgaagatgaaggaggaagaatgtattcatgacttccacatgaacattcttgaaattgccaatgcttgcactgccttgggagaaaggatgacagacgaaaagctggtgagaaagatcctcagatccttgcctaagagatttgacatgaaagtcactgcaatagaggaggcccaagacatttgccacatgagagtagatgaactcattggttccttcaaactttgagctaggactctcgatagggctgaaag

SEQ ID NO: 19022 - DNA, 327 bp, Glycine max
  unsure at all n locations
tcatgattgcctaagtgtggaccctcaagtgcaatcctttattcttctctttnttcggagccccatgaatgtcattgcctagcgctgttcatgtgtcctccaccttccagcttggtgctatatttcatgattgcctaagtgcggaccctcaagtgcaatcctccattctcccccttctttggagccccatgaatgttatttcctagcggtgttcatgtgtcctccaccttcgaatttggtgctatatttcatgattgcctaagtgcggaccctcaaggcaatactccattctcacactttcttggagccccatgaatgtcattgcct

SEQ ID NO: 19023 - DNA, 426 bp, Glycine max
  unsure at all n locations
agcttttatatatatgttcatagtgtatgctaactttgtctccttctttaattccaatccccactcggacttccaaaatagcagattctgaatatgataaaaagaaagatccacacattaatatttaagttttatagttattccaaccaactggggaaatttagattcatcatanatagattagtaggctaattttgcatatctgaccttgcagagtatataacagaatttgggccgatgtacttatacatganaaatgggtaggaagaaactaaagatatggaaagcaacatcacctgataaaggtatgtgattgactcaacggaagatcttctccaatggcaacaaggatntgccattcaacaagatcctgaccaacaatcatttttgaacatggatgatcaacctgtattaacatcccccatg

SEQ ID NO: 19024 - DNA, 394 bp, Glycine max
  unsure at all n locations
tgccccaatgattgcatactgtacaggcatgaattttatgtaatgtccaaatgccctatctatgggacttcacggtacgaagtgaacgatgaagaacacagtagttctgatgaaaactccaacaagggccccccaacaaaggttttgtggtatcttccaatcattccaaggtttaagcgtccttttgctaacgaggacgacgcanaanaccttacatggcatgcaaatggaaggatttctgatggaatggtccgtcatccggctgattgctcccagtggaagaagattgatggtttgtatccggatttcgggaatgagccaagaaatcttagacttggactagccagtgatggaattgaatcatatggcaccttaagcactcaacatagttcat

SEQ ID NO: 19025 - DNA, 398 bp, Glycine max
agcttttgttaatatattcgttctgaacttatcttggaattaattgtttcttaaaaaggaagtgtacacaaataacattttaagaaaaaaaaacttttaaaaaacaacttttaatgaagaaaagtaaaaataaaagaaaaagaaactgtagcaaaaagttaatattatgatcttttacttctatttctttttttccaaattataaaaattgaaggacacacaatttaaaaaattcaacttaataagtaatttctaacttaaaagatatttttattttctatgtctatattgttaaaaagtaatttagttaaatgcattcaaaatattttttatattattattaaatcttaaattgagatattaattaaaacttgtgacttcttataattattacttta

SEQ ID NO: 19026 - DNA, 297 bp, Glycine max
ccttatcgacgattaacaacagcttttaatgaaaggcaggagaatgaatgccccccgaaaccattaactggaaacgaagttcatgattgggtaaacgacattgtaaccgtgtttgggaagtcccatttgaagacatcatctcgcaacaacatgtggaagaaacgcttaatattctttgatcttccatactggtctgatctacatgtgcgtcattgtctagatgttatgcatgtggagaaatatgtgtgtgatacgttaattggctctcttcttaacattaaacggaatacaaatgat

SEQ ID NO: 19027 - DNA, 414 bp, Glycine max
  unsure at all n locations
agcttttgattccttcaaacaacaataactttttactcggatgtctgattgacacctgtaatatatccagacgctcgaaattgaataccgaagctctgagcaaattcaaacgacaataagtttctacttgtatgttcgattgactctggtaatatatcgaaacgctcgaaattgaagaccgaagctctgagcaaattcaaacgacaataactttttactcggatgtttgattgagtcccgtactatatcgagacgctcggacttgaatgccgaagctctgcgcanattcaaacgacaataacttttttcctcggatgtctgattgagtcccataatatatcgagacgctcggacttgaatgccttagctctgagcaaattcaaatgacaataaatntttactcggatgtctaag

SEQ ID NO: 19028 - DNA, 430 bp, Glycine max
  unsure at all n locations
acacatagaatactaagcttcggattcaagtccgagcgtctcgatatattacgttgantttgtctgacatccgagtaaaaaagttattgtcgtttgaatatgctcagggcttccgtaatcaatttcgagcgtctcaatatattacgggactcagtcagacatccgagtaaaaagttattgtcgttggaatttgctcaaagctgtcgcattcaagtccgagcgtctcgatatattacgggactcaatcagacatccgantaaaaagttattgtcatttgaatttgctcatagctaacgcattcaagtccgagcgtctcgatatattatgggactcaatcagtcatccgagtaaaaaagccattgtcgtctgaatttgctcatagcttcggcattcaagtccgagcgtctcgatatattacgggactcaatc

SEQ ID NO: 19029 - DNA, 370 bp, Glycine max
  unsure at all n locations
agcttttcntttgtntgattttcatacaacaacctgtctggtttggcgcctggtaccggtcaattcagctacttcaattacacgtctttcttgggaaaccctgacctctgtggcccctatttgggtgcttgcaaagatggggttgccaatggcgcacaccaacctcatgttaaaggtctctcctcttcttttaagctgctacttgttgttgggttgctactatgttccattgcttttgcttgggctgcaatattcaaggcccggtcactgaagaaggccagtggggctcgtgcatggaagttgactgcgttcaacgtttggacttcacttgcgatgatgttttgcattgcttgaaggaggataatattat

SEQ ID NO: 19030 - DNA, 453 bp, Glycine max
  unsure at all n locations
tgcanaccanatgctcaccactgctagacgaaaagttctttttgtggttcatataaacctcctgctctaaatcaccattaagaaagattggtttcacatccatttggtgcaactcaaggtcaaaatgaacaactaatgtaaagataataccaagataacctttattagatacaggagaaaatgtctgtgtaattgattcattctttttaagtaaatcccttagcaatgagtcttgccttatatctttcaatgttgcctaatgaatcccttttggtcttaaagacctatttactgccaatggcctttgccccattangcaactctacaaggtttcaaactccgttactctgcatgaaattcatctcatccttcatagcatcataccatanatntgactctttacaactcatggcttgctcanaagtttcgggatcattttcaactgcaatatta

SEQ ID NO: 19031 - DNA, 372 bp, Glycine max
attcttaatagaagaccttataaaaaaaatttaaaaaaaaatctttatgaactatggagaaaaagaaaactaaatctaaaatatcttaaagtgtgggggtggctaataaaaggtaatatccctattaataagaaatgaaaaattgaaaaaaatggtaattggattttggtggatattttttacataatactacttatagattcttagtttgtaattcagaagtaactgaaatttctaatgttactattatgcaatctagagatgttacttcctttgaaaatctttttccttaacaaataaatccgtaaatctttatatggtttgaaacaaactcccaaagcagtacacaaaaagttgattaagttattcttt

SEQ ID NO: 19032 - DNA, 401 bp, Glycine max
  unsure at all n locations
agcttttctctaaatttaaaatatgcatcaaacattgccatgaaggtacaagttgatgattcatggctatggaattgaagatttggccacttcaacacacatgccttgaagttgttacatgagaagaacatgatgagagatcttccaagcataaaggagaacaatgaagtgtgtgaaggatgtctccttggtaagcaacaccgatttccttacgcaacaggcggagcatggagagcgaaagatctattggagctgatacatacggacgtttgtggaccaatgaggacgccatcacatgagaacaacaagtacttcatactcttcattgatgacttctctagaatgacatgggtatattntctaatagaaaaatcaaaagtctttggagtattcanaaagtt

SEQ ID NO: 19033 - DNA, 450 bp, Glycine max
  unsure at all n locations
ttgtgccanaatcccaactcaccataaaccttgacccgggatgagaatttccatcgtcgccctcggaagaaaacaaaaaaagaaaaagaaagttcccgatcaaagatcggaagaaaacaaaaatagaaaaaagttcgcgatcaaagatcggaagaaaaaaaaagttaccgatcaaagatcggaagaaaccaccacttgaagtggtcctctccctttgattgccaaccaaaatcttgtgcactagtgacattctcgtcccgcactaaacaaaaacagaaaagggaaaggccaaaacactcagccaaatttctcaccaaaacaccattcccgaaaatgtcctattgatccatgatcatgcatgtaatctttgatttgataggaaatgattttcanaatcaagtcatgacatatctatgggttggaattaggataaaacacttgcctatgtga

SEQ ID NO: 19034 - DNA, 407 bp, Glycine max
  unsure at all n locations
agctngtaatattgaacaacggaagctctcgagaaactcaaatggtcataacttatcacacggacgtctgattcagccgcataatatatcgagaagctggaaattgaacaacggaagctctcgagaaactaaaatggtcataacttttcacacggaagtccgattcaggtgcataatatatcgagacgctcaaaattgaacatcggaagctctcgagaaattcaaatggtcataacttgtcacacgaatgtccgattcaggcacataatatatctagatgctcgaaattgaacatcaaaagctctcgagaaactcanatgctcataacttatcacacggatgtccgattcaggcacataatatatcgagacgctcgaaattgaacaacgtatggtgtcgagaaattc

SEQ ID NO: 19035 - DNA, 443 bp, Glycine max
  unsure at all n locations
tgaatttgacaacagaagctctgagaaattcaatggttattacttatcacacggaagtccgattcaggtgcataatatatcgagaccctcgaaattgcacaacggaagcccttaagaaagacaaatggtgataacttttcaaaccgaagtccgattcaggtgcataatatatcgagaagcttgaaattgaacaatggaagctctcgagaaattcatatggtcataacttatcacacggaagtccgattcaggcgcataatataccgagacgctcgaaatngcacaacggaagccctcaagaaattcaagtggtgataacttatcacacggaagtgcgattaaggcgcataatatatcgagaagcttgatattaacaacggaatgtgtcgagatattcaaatggtcataacttatgacacagaagtccgatcaggcgcataata

SEQ ID NO: 19036 - DNA, 378 bp, Glycine max
tcaagcttttatgcaacatatggagaggttaatgaaacaacgagatgatgcgctccatgagaggttggatcaaatggagaatagagatcataatgaagaagaaaggaggagaagagggaatgatggtgttcctagacaaaaccgaattgatggtattaaactcaacattcctccatttaaaggaaagaatgatccggaggcctacttggagtgggagatgaaaatagagcatgttttctcatgccacaactatgaggaggaccagaaggtgaagcttgccgccacggagttttccgactatgctcttgtgtggtggaacaagctacaaaaggagagagcaagaaatgaagagccaatggttgatacatggacggagat

SEQ ID NO: 19037 - DNA, 404 bp, Glycine max
  unsure at all n locations
tgaatcggacatccgtgtgaaaaggtatgaccatttcaatttctcaagagcttccgtagntcaatttcgagcttctcgacatattatgcgcccgaatcggacatccgtgtgaaaagttatgaccatttgaatatcttgagatcttccgatgtttaatttcgagcgtatcgatatattataagcctgaattggacatccgggtgaaaagttatgaccatttgaatttgcgagagtttccgatngttaatttcgagcgtatcgatatattatacgcctgaatcggacattcgtgtgaaaaggtatgaccatttgaatttctcaagagcttcgggtgttcaatttctagactctcgacatattatgcgcccgaatcggacattcgtgtaaaagctatgaccatttga

SEQ ID NO: 19038 - DNA, 401 bp, Glycine max
  unsure at all n locations
agctttatcttaatattttccaaatcatcaagaatcttgttgaaatcagccaattgttcagtggctgttcttgactctgtcatcttgaaggtgtacaattgttgcttcaagcatagccgatttgcaagggactttgtcatatacaatggctctagtttcaaccacattgaggttgttgtcctttctcttgcaacttctcttanagctttatctccaagcaatagaatgattgcacttcgggatttagcaatcatctctgatttctcctttgagcttagagattcaaacatcctttcttctcctttaagagcttctgcatagccatgttgaatcaagattgcttccatcttgattctccataacccgaagtcattttcccttanaacttctcaatatcgtac

SEQ ID NO: 19039 - DNA, 423 bp, Glycine max
  unsure at all n locations
agtattgctatattctgattattatgcctttttttatggttggcnttggctatattaattttatgaaaacagtctaagcaatgctggtgttttattggtttggaactaaacttaaacatggttgtgctacagattaagttggacaaggaaaagaaaagtctctcaattcgagagagagggatcggtatgaccaaggaggatttggataagaatctggggacgatagcaaaatttggaacttctggtatgtatgttgcggacattatcgctgaagtaatttttgtttgtgatgtgactgggaatatgttaattggagatgtgtgttatttcaacatttgttgagaagatgccaacaagtggagatctcaatctgattgcgcagtttggagtcagcttctactctgttatcttgtggccgactat

SEQ ID NO: 19040 - DNA, 407 bp, Glycine max
tgtagggttaaagtttcacgattgtcatgtgctcatgcatttattgttaaccgtggctatacgagacatcttgccaaacaaagtcaggttcacgataactcgcccgtgctttttcttccatgctatatgtagcaaagtgattgatccagtaatgtttgatgagttggaaaatgaggccgcaattatactgtgccagttggagatgtattttccccctgctttctttgacatcatgattcacttgattgtgcatctggtcagagaaatcaaatgttgtggtcctatttatctatggtggatgtacccggttgagcgatacatgaagatcttaaaagggtatacaaagaatctatatcgtccggaagcatctattgttgagaggtacattgcagaaaaaccattgaatt

SEQ ID NO: 19041 - DNA, 287 bp, Glycine max
  unsure at all n locations
tactaagctgaaatgacatcgaagctctcgacaattccaaggtataatantgcacacggaaggtcgattctagcgcatcacatatcgagacgctctaaattgaaaacccgaagctctcgagaaactcaacaagtcataaactagtcacacggaagtccgattccggcgcataatatatcgagacgctcgaaattgaaccacacatgctctcgaagaattccaatgatcataacttttctcacagaaatccgattctggcgcatcatatatcgagatggtctgaattg

SEQ ID NO: 19042 - DNA, 373 bp, Glycine max
  unsure at all n locations
agcttatataaccaccgtgctccacccagctcatcgagtaactcatccaccgtgggtatggggaagcgatcgcgcaccgtgatggcattgagagccctatagtctacacaaaatctccatgatccatctttctttcttaccagcaagactggggatgaaaatggactcgagctaggttgtataaaacctttcgcgagcatagtagctacctgttcttcgatctccttcttctgaaagtaaggatatctatatggtctaaccgttcaccgggttgagttaggcaatagattgatggtatgatctgtggatcgtgatggtggcanggtcgtgggaggttggaagagggaagcgtatntggtgatcaatgtattga

SEQ ID NO: 19043 - DNA, 449 bp, Glycine max
  unsure at all n locations
gatactgtganatagaaactaacctctacacttataatatcttctccaaattgngcactagattntgaaataatgtgtgatgcaagtgattatgcagtaagagcagttctgggtcaaaggaaaaataaaatgtttcatgtcatacactaacaagcaagggtttaaatgaagctcaaataaattatgccacaactgagaaaaaattgcttgcaatagtatatgctttggaaaaatttaaatcttatttgataggatctaaaattgtggttgttactaatcatgctactataagatatttgttagttaaagctgattctaaaccctgacttatccaatggattctattgttgcaagagtttgacttaaagatcaaggatgaaaatggaagtgaacattatgtggcagatcatctgtccagactgaccattgatgaggtgaccacacaataa

SEQ ID NO: 19044 - DNA, 438 bp, Glycine max
  unsure at all n locations
taaaaagaatcatgtaatagtagntntgtgatctctgatttaactaataacttgtgaatagcatattcactcttatctgattttttgntattatctattttaccctatttttcaaggtttttggcactaagaaggccctatggttgtttccattgttttcaaaagaggatttaaacaacatacctgcactaaggggcattgagttccctacacgttcggatgttgatgtatgaaagctgggtagcttataggtttgaacattnttttcattaaatgatgtcatttatgcttacttcatgacagtgcagcgtanggcatgaaagtaatactctacttgattgctgatgttttaaattatagaatngtccagtagatgtatatatgtaatgttcgattcagaatgtttgattattcttataatctaagaacctgtgatct

SEQ ID NO: 19045 - DNA, 406 bp, Glycine max
agcttctgttgttcaatttcgagcgtctcgatatattatatccccgaatcggtcttctgtgtgaaaagtttgaaccattcgaatttctggacagcttccgttgttcaatttcgagcgtctcgatatattatgtcccaaaatcggacatttgtgtgaaaaggtatgaccattcaaatttcttgagagcttccattgttcaatttcgagcgtctagatgagttatgtccgcgaatcggacatcctatgaaaaggtatgaccattcgaatttctccagagctttctttggtcaatttccagcgtctagatgaattatgtccgcgaatcggacattctatgaaaagttatgaccacttgaatatctcgaatgctttccgctgtcaatttcgagcgcctctatattttatg

SEQ ID NO: 19046 - DNA, 455 bp, Glycine max
  unsure at all n locations
ntggagtttccaagtgccaattcgtcttcttctttagtccagtcttcttctggcttcaattcttcagtgggctttccttctgtgtccagcatcttgggatgttcccagcctttgatgacagctttccaggttctgctatccagtgatttgaggaaggccaccattcttgctttccaatattcatagttgcttccatcgagaattggtggtctgttcactggtccgccttctttctccatgttcatcagaatttatctccctagatctcactctgtgatttccagtgttggctctgataccaattgaaattctgataccaggggacagatgtcgtacaagatgtcacgacatcacgcttcagaacatgcagattatatgtgtccgtatgaacagattatacaagtaaataacacaagagaattgtgtacccaggtcggtgctacctcacctacatc

SEQ ID NO: 19047 - DNA, 361 bp, Glycine max
  unsure at all n locations
tactaagcttggacatcaactaacttcattccctatgcatattactatctctttatatctttgacccgaaatagngggaatggtgagattatgataagataatattgaacatatcatgtttttaagagtggctgatgtaatatcttgcatgttggagtataagtataaggtgaagtcccacatcgggttaaaatggacaagttgagcaccatataagtgaggagaagacccataaaccagagccttaaggttttgggttaaagtgtggtgtcaagttcacttatgtggttgctcatgattcattgatgtaaatctctccaatttttacccccgctcagttgcacaacaattggtattaaag

SEQ ID NO: 19048 - DNA, 387 bp, Glycine max
  unsure at all n locations
agcttgtatgtttgtacatgaccaaatctttagttaatcgtctttacctaaagcagtctttgtattcgtttaaaatgcatgaagatagatcagtaggagaacaattgggtttggttaataaaatgattctagatcttgaaaatatcgatgtcaccattgatgatgaggatcaagctttgctattgctatgctttttgcctaagagttactctcatttcaaagagactttactatttggaagagactctgtttctcttgatgaagtgcatgctgctctgaatttaaaggaattgaatgaaagaaaggaaaagaagtcctctataagtggtgaagggctgacaacaagaggcangaccttcaagaaagatagtaaatctgataagaaga

SEQ ID NO: 19049 - DNA, 452 bp, Glycine max
  unsure at all n locations
tnccatagttctgaataaatcttctatagtagcttgaaatttctatatattctcttaattctttgactgtctcaggtcttggccactgttggattgccttaattttatcaagatctggatgcacccctttgacagaaatcaaatgtcccaagtaattgattttggttgttccaaagctgcattttttgtagttgaatgccaagttgcgttcttgtagtatttgtagtgtagtgtgcatgcattgaatgtgttctgaccatgtcttggtatagactaagatgtcatcaaagaaaaccaaaatgaacttcctaaggtgctccctgaaaatatcattcatcagattttgaaatgtggctggtgcattgctaagtctaaaaggtaacacaacccattcatagtgcccactatgggttctaaaggcacgtttatgaatgtcttcctctaccattctg

SEQ ID NO: 19050 - DNA, 425 bp, Glycine max
  unsure at all n locations
tgcaattgacataaagggacgtcccanaatgactggtacctcatggtcttcctccagatccatgaccacaaaatcagctggaaagaccttcacttttatcaaaacattctcaattaccccggaaggtcttgtgatggatcggtcaacaagttgtaaagtcattctcgtgggcatgatttccaactctcacaaccttctacacatggagagcggcattaagttgctactggttcccaaatcaatgagagtctttctgatgtgccatcattttcttctatttcttaaaccctttntgcaccattttaattactgattagtcttaattgtcaaattaattaagcagttttattatttgggcacattgagctaatttgatgtttntaatctaatttcatgaattaatgaaacattgggcttaatctgga

SEQ ID NO: 19051 - DNA, 398 bp, Glycine max
  unsure at all n locations
ntgatggtgtcgagaagaaatcacatgtctgtcatcatcttataaggggagaatgtgaatgtatgtatacatgattttgatgatgtcaaagaagaatttaacaaggctgcttcaaatgataagcatttgcttcaagaataattcaagattgcttcaacaaacaaagccttggttcaagattcactaaagaccaagccttgccttaaaacaaagtgctttcaagacatgcaaggctctggtaatcgattaccaggaagtgtaatcgattaccagaagacagggttgagaaatagcagttgaaaaaggttttgaatttgaattttaacatgtaatcgattaccatatgtctgtaatcgatcactagcaacggaactttggaaattcanattcaaaagtca

SEQ ID NO: 19052 - DNA, 368 bp, Glycine max
  unsure at all n locations
tctagcttattcgaagccccttgaattgattgtcgttcatgcatcctcaaccatngagtacggagccccatgaattgattgcctaacgctgttcatgcatccttcatcatcaaatcttattcggagccccatgaattgattgtcgttcatgcatcctccaccattcagtccggagccttacgaatagactgccaagctctgttcatgaatcctctatcatcaaatcttattcgaagccccatgaattgattaccattcatgcatcctccaccattgagtccggagccccacgaattgattgcctagtgttgttcgtgcatcctccaccatcttattcagagccgcatgaatngattgtcgttcatgca

SEQ ID NO: 19053 - DNA, 437 bp, Glycine max
  unsure at all n locations
tagaaannatgggtgaacatatgacatcnttcttatattttatctcaatttctctcttggttcttgttaagattatatatatatacacggacttactccactcaatgccaatgtctatctttaatgtttaaatttagagttgatctcttttctcaatttttcaattaaaattacatcaaagaagtcatatatttagagataatacattgtttattcttgataaggatgttcaaaactaattacacaagtgaggactaaaaattgagtcctgatacaaatttatccttgtacagaagtctttagtatcatctctaatgattctcaaactattaattatctcatcatttatgtcttgtataattcagatataagtcatgtaaatatatttctttgtcaaagctttccataatacttatctcaacactccatcaaatatt

SEQ ID NO: 19054 - DNA, 414 bp, Glycine max
ctatatggacgaaagtgcaaaactcctatttgttggtatgatgatggagaagcagtacttcttggacctgaaatgctacaacagattaacgaacaagtgaggttgattcgagagaagataaaagcatctcaggataggcagaagagctattatgatataaggaggaagccactagattttcatgaaggagaacatgtgtttttgaagggttctcccgtaaccggagtcggaagagctcttaatgctaggaagttgacacccaagtatctaggtccatatcaaattttgaagaagattgggcctgtagcttatcatatcgccttacctccgagtttatcgaatctgcatcctgtgtttcatgtctctcaactgagacggtacaacccagatccatcacatatacttgcagtggac

SEQ ID NO: 19055 - DNA, 435 bp, Glycine max
  unsure at all n locations
tagccctagagaggatggaccttttcaggttttggagaggatcaataacaatgcctataggttggacttcccagaaaagtatggagtcagcaccacttttaacatttctgatttaattccttttgcaggtggagctgagattgaggaggaggaactaacagatttgaggacaaatcatcttcaaggggaaggggatgatgcaatcctccctaggaagggaccagtcactataaccatgagcaagaggctccaagaagattgggctagagctgctgaagaaagccctatggttctcatgaacctcagggtagatttctgagcccatgggccaaggctgagtccaattatctttgtacatattagactangatgtcattatatttggtccttgtatttanggctccatattctangtagggtaccctataaatatac

SEQ ID NO: 19056 - DNA, 420 bp, Glycine max
  unsure at all n locations
ggaatcggacctgagtgtgaaaagttatgaccatttgaatttctcgattgtctttcgttgntcaatgtcgagcatctcgacatattatgcgctcgaatcgaacatccgagtgaaaagatatgaccatttgagtttctcgagagcttccgtggttcaattccgagcatctcgacatattatgtgcccgaatctgaccttcgtgtgaaaagttatgaccatttgaatttctcgagagcttccgatgtttaatttcgagcgtctcaatatattgtaagcctgaatcggagctcagtgtgaaaagttatgaccatttgtatttctcgacagcttccttggttcaattccgagcgtctcgacatattatgtgcccgaatctgaccttcgtgtgaaaagttatgaccatatgaatttctcgagagc

SEQ ID NO: 19057 - DNA, 445 bp, Glycine max
  unsure at all n locations
tgtaggccttggatcttcttcatcaatggattcctttgcttcttgatgtctgattgcagcagaatggagaaggagaaagatgaatggagacgccacttcaagtagaagatgagtctagaaaaagctcaccaccataggatgccatggataagagcttgaaggtagaagaagatgaatgaagggacaggaaaagaagagcacgaaatttagtgcctctaaagaagtctgaactttgaagtttaattctcaaaatgatcaaagttcaaaaaaatgcacacacatgacctctatttatagcctaagtgtcacacaaaattagagggaaatttgaatttctattcaaatttcacttaaatntgtggagccaaattttggagccaaaatttcactaattatgattagtgaatnttagttatggttcagcccactaatccaagatcaagtc

SEQ ID NO: 19058 - DNA, 439 bp, Glycine max
  unsure at all n locations
cttatagagaaaatgatggtatgattntctacccaatcttattatgttgaacagctatatattaaagaagtttaattattttgatgtgaaacatgtttctactccttataactcatccatcaagttaaagaaaaatttgagtaaaggattttcttcacataaatattctcaaagtattgattccttattgcatttgacaaacttctctaggccagacattgcatatgcagttggtagattaggaaggtatactaataatcctgatcattctcattggattgcattagaaagagtttttagatacttaaaaggaatcatcaattatgacattcattatacatgttntcctgcagtaattgaggggtttaatgatgcaaattggatttctgattctgatgaaacanaatcaacaagtggttactgttttactttagctagt

SEQ ID NO: 19059 - DNA, 439 bp, Glycine max
  unsure at all n locations
nttacctgcttatcttgacccanatttgcaacttcaagatctcctcactggtgtaagctttgcctcaggcggtgccggatatgatcctctaacagctgaattagtggtacataaccatatattcaaccttgttcatgctatctatcaattaataatttactttggcacatcttagagctaactccagtctattttctccttgtcacaagaatgtgatgtcattgtcagatcaattagacatgttcaaggaatacataaagaagataaatgaagcggttggaagaaacagaacgacaatgatagtatctaagagcatatacatagtatgtgtaggaagtgatgacattgccaatacttactatcaatcaccttttaggagtgctgagtatgatattccttcatacacggacttcatggcttcagaagcctcanaattctt

SEQ ID NO: 19060 - DNA, 440 bp, Glycine max
  unsure at all n locations
tgtccgcanaanatcactcaagaccgttttaaggtccaacgccttanaacggtcctctttgcttatattggttaaaatggaccattcaaagcataaaatcaacatataaatttatcgcttttgcaagaactacgtaggtatgattttctcatcacaattgaggatacgtaggagcaaaagccccacttttgtcgaccaccccaagagatcgttaattatccaacgccttaacgcttctctcatttcaaaaatcaagagatcattaatggtccaacgccttaatgtttctctcctttcaaaaccaagaaattgttaatggtccaaacgccttaacgtttctctccttttcaaaaatcaaaagatcgtttaaaaggtccaatgccttanacgacttttgttcggttaaaatatatcttgcgannaaacataaaaacaactta

SEQ ID NO: 19061 - DNA, 433 bp, Glycine max
  unsure at all n locations
tcttagtttcagctgatgaagatgaattcgtggctacttcatgcactcctctaacgacaatagcatcattttggcactaaactattgggagttggaagtcatcttctcaattaaattcctagcttcaacaggggtcatgtctcctaggactccaccactagcagcatctatcatacttctctccatattactgagtccttcataaaatattggagaagaagctgctcagaaatctggtggtgagggcaactggcgcatggtttttgaaatctctcccagtattcatataggctttctccactgagttgcctaatgcctgaaatatcctttttgatggtcgtggtcctggaggcagagaanattttttctaagaatactctcttgaggtcatcccagctcgcgatggaccttggagcaaggtaatatagtcagt

SEQ ID NO: 19062 - DNA, 438 bp, Glycine max
  unsure at all n locations
tgcctaattaacctgaaattgagagaaaatgattattaaatttactaaatggaagtactaagtatttattgcctatacttaacagaaaatacttataacactacaaaataaccataaattggaagagtttgatacaatttacacaagttttatacacataagttagtcgtattcatcgactaacaatggtccaaaatttaattggattgggcttctcccaattcaattaaatttctctcccaacacacacacatcaaatagtgcacttaatgcatgtgaaattacaaaactacccctaatacaaaaactagtctaggtgccctanaatacaagggctaaaaaatcctacattactagggtaccctccctacactacggagccctaaatacaaggaccaaaaataatgaaaccttaatctaatatgtacaaagataagg

SEQ ID NO: 19063 - DNA, 441 bp, Glycine max
  unsure at all n locations
tgagcgtagtggaagaaaagttcttgaatagaattttccctccttctagatatatcagtgcaaagtcagatgtttccactttcaagtaagaaccagatgaacccatttgtgaagtctggaagtgattcaaatcattgttgagaaaatgtcccaatcatggttttgatgatgttacccagctaagcatattttgcaatggtctaaggcctaaaactaagatgattctggatgcagtcgctagtggaacaattatgtttgtagatgttgaacaagccacaaggataattgatgcctttgcttcaactgatcaccaatctcagcataacagacaatcgatacagaaaagaggagtgttggatctcattctcaagggtttttcaaaggaagtgtaaaaacattntgttgtggtacctataacacaagagacgctgagagaagctc

SEQ ID NO: 19064 - DNA, 432 bp, Glycine max
  unsure at all n locations
tagccctagaggggatggaccttttaggttttggagaggataaataacaatgcctataggttggacctcctagaagagtatagagtcaacaccacttttaacatttctgatttaattccttttgcaggtggagttgatattgaggaggaggaactaacagatttgaggtcaaatcctcttcaaggggaaggggatgatgcaatcctccctatgaagggaccagtcactagagccatgagcaagagactccaagaggattgggctagagctgctgaagaaggccctagggttctcatgaacctcacggtagatttctgagcccatagaccaaggttgggtccaattgtctttgtacatattagactangatgtcattatatttgatccttgtatttanggctccataatgtangtagggtaccctagaaatat

SEQ ID NO: 19065 - DNA, 439 bp, Glycine max
tataattctaatatatctcttaatgagaacaatgcatgttattgttacagttcttgagattactttcacaagaattggacgatggttcttctcaaaggttagatcaagaacgtgctttgtcaagtgcggttgatggtatagcacttgacatgcagagaaaatccgagtcttctgagtgtaaaagagagaagcttcgtgaatatgagcatcaatgtcgtgagaagatttcaattgatgatgttcagcctcattgtgaaaaggtggatgcacatttggaagttcagaaggagacggatgctgctcctttacttgactgtaaagagacgcagcagggatctgttgattggaaaattgatgagagaccgattgaggaagtaatgatgctgagtgatcagaggaaggtgacagttctgtatgaacttctgtctggttgtctatc

SEQ ID NO: 19066 - DNA, 345 bp, Glycine max
ctccaataattcaaatggtcataacttttcacacggaggttcgattcttgcacatgatatatcgagacgttcgtaattgaacaacggaaaccctcgagaaattcaaatggtcataactttttactcggatgtccgattcaggcacatcacatatcgagacgctcggaattgaacaacggaagctatgaagaaattcaaatggtcataacttttcactcgaatgtctgattgatgtgcatcacatatcgcgacgctcgaaattgaacaacggaagcaatcgagaaattcaaatggtcatacttttctgaccgatgtgcgattcaagtgcatcacatatccagacgc

SEQ ID NO: 19067 - DNA, 431 bp, Glycine max
  unsure at all n locations
tgtatttaacaatgttntanaaatacttttaattaatatttgaatttttattcctttattaatatatatgtgaggggtagagggtgtcacactatatataattgtttatgttttagtgttttaatgataaacttatttgactaacaatggattagggttactataatacctanggtttagtgttatatgtcttattagggttcagttttacttgaatacgtaaggcttagtggtatgtgactaattaacgttcaatgttagttcagtacttanggtttattgttacgtgactaatatagggtttatggttgtgtgaatacctaaggtttagtgttacatgtcttattacggtttagttttacttatatacgtaaggtttagtggtatgtgactaattaacgtgcaatgttagttcaatacttatggtttat

SEQ ID NO: 19068 - DNA, 443 bp, Glycine max
tgagatatccgtaaagatcaaagaagaggtgaaaaagtagttcgtcactggctttttggcagtggttcgataccccgaatgggtggccaatattgtgccggtccctaagaagatgggaaggtatgaatgtgtggactattgggacctgaaccaagccagtccaaaggataacttccctttaccacacattgatgtccttgtggataacacatccaatttcactttgttttccttcatgtacgggttctcgggttacaatcagataaagatggtgccggaggacatggagaagactatgttcgtcaccttgtggggaatgttctattataaggtgatgttctttaggctcaagaatgctggggcaacctatcagcgggctatggtagcattattccacgatatgatgcacaaagagattgaagtctacatggatgacatgattt

SEQ ID NO: 19069 - DNA, 381 bp, Glycine max
tcaataactgttcatgtccattacctgtagaaatctcacaaatgtctggacttaccttcttaaccttaacctacaaccaggtctctggacctattccatctgaattgggaaagttgactcgccttatggcacttgatcttgccttcaacaatttcactggaccaatccctccaagccttggaaacttgagttctctcctatggctaaccctttcagataattcgttatctgaagaaatcccaccagagctgggaaactgctcaagcatgttatggctgaaccttgcaaacaacaaactctcgggaaaatttccttctgagctaacgagaattggaaggaacgcaagggccacatttgaatcaaataatagaaaccttgggg

SEQ ID NO: 19070 - DNA, 444 bp, Glycine max
  unsure at all n locations
aactaagcttgccagcgttattatggatctttcaagattatcaaacgcatatgtcctttggcctatagacttctgttgccagcagggtctcgcattcacctggtctttcattgctcactactcaagccatttcttcaagatgttgacaatcaactcgcgccacttccactcccaccaacgaccttggataaccaacctgtgatctcatcgttagctattcttagctcgcgtcaggaaggtccagatgaagacatgtatctccaagttctagtgcagtggaagggtctccacgtagacgacacctcgtgggaggactgggccacattgaagggcacctatcaccttaaggacaaggtgattnttgatgaggttgngaatgatagaccaagcgggtcacaagcagtccataccgagaggcccacaagaaagatcacaacacctcga

SEQ ID NO: 19071 - DNA, 448 bp, Glycine max
cttgcctttgcaattccaagacactagtgagcttccaagtatatgacatgtaccatttgtaattttcctatctaatttgcatcttccaaaatcagagtctgaaaaaccttttaagtttaaggaagttcctttggaataccacaaacctacattggttgtgcccttaagatacttaatgatcctcttaacagtagttaagtgagattcctttggattggactgatatattgcacataatcaaacacttagcatgatatccggtctacttgcagttaggtagagaagtgatccaatcatacctatgtatcttgattcatccactgatttacctttctcatctaagtcaaggtaggttaatgttgtaacgcctttaaatttcaataactgaaaatagatgtttgatgtatttcttgtgttatttgattactgggattaattggatgagttg

SEQ ID NO: 19072 - DNA, 452 bp, Glycine max
  unsure at all n locations
gaaactcaagcttggtgtagaagggattgctaaaaaatgtaatcggatgtccttgttgtgttagcacagtgcccattcctacacctggtgcatctgtttcgatcatgaagggtaaggcaaagtctggaaaactcagaactagagccttgttgattgcttcctttagttgctcgaaggcattaatggcttttggagtccaagtaaattggtcctttgccaaaagttgtgttaatgatgtagcaatagctgcataccctttaatgaatcgccatgagccatcacttttcttaaccaggagaaccgaagatgagaaagggcttgtgcttggctagattatgccatttcgtaacattgattctacttggttctcaatttcttgcttctggaaatgggggtatcggtatggtagcacattaactggttntgagtttggaaggagatggatcacatga

SEQ ID NO: 19073 - DNA, 409 bp, Glycine max
  unsure at all n locations
cctttcattntaacccttagaacttcccagttcaaattgtcatagataaagnaatgttgatgttcaaaggacactttaaatccctttttaatcaattgacctacacttagcaagttttggtcaatgttaggtacataaagaacatctgatattaatttgatacctgaacatgttgaaattgcaacagttccttttccttttactgaaatatagccaccattcccaattctgacctttgagacattanttggcttcaaatccttgaatagagtcttatcatatgtcatgtggtttgtacaaccactatcaatcaaccaactttcacttgattcactactcaagaagcatgtggccacaaacagttgatcctcctcttcttgattagcaatctgagctccctcatcatgat

SEQ ID NO: 19074 - DNA, 422 bp, Glycine max
  unsure at all n locations
tgtaggccttggatcttcttcatcaatggagtcctttgcttctttaagatgaatggcagcgtaatggagaaggaagaaagatgattggagacgccacttcaaggagaagatgaatcaagaagaaactcaccaccataggaagccatggataagagcttgaaggtaggagaagatgagtggagggagaggagaggcacgaaattttgagcctcaaatgagatctgaactttgaagtataattcttaaatgatcaaagttgaaaatatgcacatacatgacctctatttaaagcttaagtgtcacacaaaattggagggaaatttgaatttctattcaaatttcacttgaatttgaaattgaatttgtggagacaaattttcgagccaaaaattcactaattatgattagtgaattntagctat

SEQ ID NO: 19075 - DNA, 449 bp, Glycine max
taagagcaaaaactacggctactaactcaagatcgtgtgtgggataattcctttcatgtatcttaagctgtcgagaagcataggccactacctgtccccgttgcataagcactccacccaaacccatcttggacgcatcacaatacaccacaaaagattcactcgggttaggtaacactaaaactagtgcagtggttaacctttccttaagggtacggaaactactctcacattgggcatcccacacaaaaacttgacccttacgagtaagcttagtcaaaggtaaggctagcttagaaaaaccctctatgaatctacggtagtatcctgctaagccaagaaagctcctaatctcaaacactgacttaggactctcccaactcatcaccgcctctaccttggaaggatctactggctatccctccttagatataacgtgccctaagaag

SEQ ID NO: 19076 - DNA, 429 bp, Glycine max
tcaacattcaatatcgagcgtctcgatatattacgggactctatcagacatccgagcaaaaagttactgtcgtttgaatttgctcagagcttcgataatcaatttctagtgtctcaatatattacgcgactcagtcagacaaccgagtaaaaagttattgtcgtttgaatttgctcagagcttcagtattcaattctgagcatctcgacatattacgggactcaatcatacatccgagtaacaagttattgtcgtttgaatttggtgagagcttcgataatcaatttcgagcgtctcgatatattacgggactcagtcagacatccgagtaaaacgttattgtcgcttgaatttgctcagagcttctgtcttcaatttcgagcgtctcgacatattacgggactcactcagacatccgagtaacaagta

SEQ ID NO: 19077 - DNA, 435 bp, Glycine max
cttaattaattgtcttgatataaaatttctacacagactaataatttcaaagtctatacagtcgtattacttttaaatttggatgtaattgtgtgtttaattttctaacccattaaaagagttagaaaacaatgaagaccacaatatcatctttttttatcattattttaaagtactaatttatttcaatacatgtgaaatttttttaaaaattatagtttatacgctatttatttaaaacataatctttatattataatacaaaaatatcactatttcatactcatacaatcagtatgaatataataaacactataatttgtctaattattattatatatatcattattatataacaataacatttacaatagtcgtattctattactattagactcaaataaaaatcaaaatctcaactatattatttattga

SEQ ID NO: 19078 - DNA, 389 bp, Glycine max
agctttcttatgaagattcctaaagaatctagagcttagctacacatacctctctaatagctaagctcacctccttgagatgagaagctagaacttagctacacacccccaataatagctaagctcatccccatgacaaataacatgaaaattcaaaaaaaagtccttactacaaagactactaaaaatgccccgaaatacaaggctaaaaccctatactactagaatggtcaaataaaggcccaaccgaaggataaacctattctaatatttacaaagataagccggctcatacttagcccatgggctcgaaatctaccctaaggctcatgagaaccctagggccttcccttggatctctagcccaatctacttggagtcttctacca

SEQ ID NO: 19079 - DNA, 336 bp, Glycine max
acaattgcatcacctctcaatgagctggggaagaacaatgaggcatttacctgcggtgaaaaacaagagcagtcctttgctttgctcaaagaaaagcttactaaggcacctgttctagctcttcctgactgttctaaactttagagctaaaatgtgatgcctctggagtgggagttggagctgtattgttacaaggtgggcactctattgcttattctaatgaaagactccatagtgcccccctcaactacaccacctatgataaagagcattatgccttataaaagccctgcaaacatgggaacattaccttgctttcaaagaatgtgtcattca

SEQ ID NO: 19080 - DNA, 398 bp, Glycine max
agtcttgtagcaaatgcaaaccacaataaattatagctcggatatcccattgagtcccgtaatatatcaagacgctcaaaattgagtacagaagctcttagcaaattaaaacgacaataactttctacacagatgtccgattgggtcacgtaatatatcgactcgctcgaaactgaataccgaagctgagagcaaattcaaacgacaatgacttttacctcggatatcccattgagtcccctaatatatcgagacgttcgaaattgaatacagaaactgtgagaaaattctaacgacaataactttttactcggatgttcgattgagtcccgtaatatatcgagacgctcaagatttataacggaagctcgtagcagattcaaacgacaataactttg

SEQ ID NO: 19081 - DNA, 388 bp, Glycine max
  unsure at all n locations
agcttttacaaaacactgtggccatctttgtctttagaagctaaagattttgtcaaacgcatattgaataaggatccacagaatcgaatatctgctgctcaggctctaagtgagttatttttcttgcctctatcatcaatttcaataatatctagtaagacattnttcaagttgtcagccataatcttgtgcttgcaggtcatccttggatacaaaattgcaataatgtaaaagttccacttgataaattgtcagccataatcttatgcttcctgttggaatgaagtattcctactttattccaacccttgtgtttgaaaatgatatataatcttctgaccacaagtattttcgatttatttctctcttgtaaacctctgagaattga

SEQ ID NO: 19082 - DNA, 403 bp, Glycine max
agcttcttctattgtcaatcacccagcaagccttggcacgagagtgtagcaatgaatgtgttgatgaactactagatggatctgtgaggatcttggatatctgtagtacaattaaagattgcctactgcaacacaaggaaagagtgcatgaacttgagtcagctattcgcaggagaagagatgccgaggccggattcacagtttcgagtggaaaatacttggcatctacgaagcaggtgaaaaaagcaattcggaaggccttatgaaatttgaaaggattcaagaatgaactcatatttgcttcctcaaacaaagacaacgagacattgtccatgcttagcttcttaaaagaatcagaactagtcaccgtgagctcattaaaagccttcttggtgttatcact

SEQ ID NO: 19083 - DNA, 363 bp, Glycine max
  unsure at all n locations
tatatangtactagcacgcagtatttcattgacatataacacctttattgactatttgctcccacttatcttgcggtatacacaatcatcaactatatttgcctaaagatcatatgaagtaatgacatgatggaacttgttgtagcgttgtctggagacttgattcagaccatagatgtgctaatttagaatgcaaaccatacactttgaatgacctgatacaaaggtttagggttgcatcatataaatgggttcttcaatgtcacaacttataaatgcgagcttaacatccatatgatgtagctctaaatcataatgagctacgagtgccattattgttctaaaagaatactttaaagatat

SEQ ID NO: 19084 - DNA, 375 bp, Glycine max
  unsure at all n locations
ttgcttttatccaaaatcttgactcaccataaaccttgacccagagtgagaatgtcaatccttaccctctgaagcacaaaaagaagagaatgaatatttccaatcaaacgataaaggagaaggaaaatttccaatcaaagaggaagcaaaaaaatgaaagaatgaaaatttccaatctaaggaaatagagaggaaaggaaattcccaatcaaagagtgggagaatgcacatagaagagaaagaanattgccaatcaaagaatgggagaaagaaaaaaagagaacgataagattgacagagagctcatgatcaatgatcgaaagagaacaaaagacatgtgcagagatgtctttggaccacacaatatctgaacaa

SEQ ID NO: 19085 - DNA, 420 bp, Glycine max
  unsure at all n locations
nttaatggaagtcaagagcatgatattgcgccgataccgttcactggtgagcaggtatatcagcgggttcaacacctgaacactgtatttgggaagacccataagaaggataaaagtcagagttgcatatggaagaagaggtccattttctttgatcttccgtactggtgtgatcttgacgttagacattgtattgatgttatgcatgtggagaaaaatgtttgtgacagtgtgattgggacgctccttaacattcaaggcaagacgaaggatggcttanatacccgtcaagatctagctgatatgggtataagagcacagttgtatccaaggtctgatgggaagaaatattacttgcccctagcctgccatactntgtccaagaaggagaagataagttnttgtcagtgtcttcgtcgg

SEQ ID NO: 19086 - DNA, 440 bp, Glycine max
  unsure at all n locations
tgttaagctacaacttgggcctaagcccaagaaatgtactcagctcagcagagacctcactagctcatgagcacaaacatatagctgaagtcctatgaaggaacatagatttgttcgcctggcagccatctaacatgccgagaatccaccccagcattgtatgccaaaaattggttgtctgcccttaggccaaacaaatctcacaaaagaaaaggaagatgggagaagaactacgtaaaacaattaggggagagatcgacaagctactcaattcccaattcatcagagaagtcaaatactcgacttgttaggctaacattgtcatggtgaggaaggctaatggaaaatggcacatgtgcacaaaatacaccaacctgaacaaagcgtatcccanaggcgtgtatcccttacctagcatcgacaagctagtggacgatgcg

SEQ ID NO: 19087 - DNA, 430 bp, Glycine max
  unsure at all n locations
agctttgatccaatacaaacgacaataactnttttctcggatgtctgattgattcccgtaacatatcgagacgctngaaattgaaagctgaagctctgagccaatacaaacgaccataactttgtactcggatgtctgattgagtcccgtaacatatcgagacactcgaaattgaatgttgaagctgtgagccaattcaaacgataataacttttttcacggatgtctgattgagtcccgtaacatatcgagacgctcaaaattgaatgttgaacctctgagccaattcaaacgacaataactttttactctgatgtctgaatgagtcccgtaacatatcgagacgctcgaaattgaatgttgaacctctgagccaatcaaacgacaataactntttactcggatgtcatgattgatgtccgaacatatc

SEQ ID NO: 19088 - DNA, 426 bp, Glycine max
  unsure at all n locations
cttaacattcaatttcgagcgtctcgatatattacgggacacaatttaacatccgaganaaaagttattgtcgtttgaatatgctcagaggttcaacattcaatttcgagcgtcttgatatattacgggactcaatcagacatccgagtaaatagttattgtcgtttgaaatggctcagagcttcaacaatcaatttcgagcgtctggatatattacgggactcaatcagacatccgagtaaaaagttattgtcgtttgaattggctcagagattcaacattcaatttcgagcgtatccatatattacgggactcaatcagacatccgagtaaaaagttattgtcgtttgaactagttcagagcttcaacattcaatttcgagcgtctcgatatattacgggactcaatcagacatccgagtaaaa

SEQ ID NO: 19089 - DNA, 284 bp, Glycine max
agcatattgagacgcttgaaattgaaagctgaaactctgagacaccacgacacaccattacttcttactcagatgtacgattgagtaccggaacatatctagacactcgaaattgaatggtgaaactgtgaacccattcaaacgataataactattttcaccgatggctgattgaggaccggaacatatcgagacgctcaaaaatgaatggtgaacctctgagcacaatcagacgaccataactctttactcggatgtctgattgagtcccgtaacatatcgag

SEQ ID NO: 19090 - DNA, 441 bp, Glycine max
  unsure at all n locations
ntggatctaattgatatcttgcacacatgcatacactaaacatattatntggcctacttgtagataaataaagtagagatccaatcatacctctgtattgctgtggatcaacaggttgaccggattcatctttgtctagatagcaacttctattcataggagtagccaagtgttttgagttttccattccaaacctcttaataagttcttttcaatactttgcatgattgacaaagatcccatcatttgtttgtttgatttgtagtccaagacagtaatttaattcacccatcaaggacatctcacactcactttgcatatcaatagacaactccttgcacaaagatgcattagtagatccaaaaattatatcatcaacataaatntgtaccaacaagatatcattatctctcttttatatgaataaggtggcatctactt

SEQ ID NO: 19091 - DNA, 468 bp, Glycine max
  unsure at all n locations
agcttcacaatatgaanatcgatcatttgatgaagccttcacattgcatttcttcaacaccttttccatatcttaattgttggggtgtccaagctttctatgccaattctccttgactgacatgtaggtacatgggtctatattgacttgagagttgacacttgaaagttggtataatccatctctaagattcccttttagtagtgccttccctgtcagtttgtccttcacatagcagtagtttgcatcaaattcaacaagagcattattgtctgcagttaatttagatacactcaacaagttcttggttatttctgggacatacaagacattacgcaagttgaggttattcaattgagtcgagcctgatgccaatatgctcaatcttttaccattgccaactaacaaagaattcttaccattgctttcactgagatcttggagttctcattntgatgagtcacatga

SEQ ID NO: 19092 - DNA, 378 bp, Glycine max
  unsure at all n locations
agcttatgaagcatcaatagaccttaagaaaatagtccatttaggacaataaacaagaaaattaatgagagttctcctagggtgatcagtccacccatcagccatcatagtacatctagtttccttccaaacttcttggtaaattttaacaagcttcctcccttcatcaaaccatttatataacaaaggaccacaaattctataaaaaaaaaatggagatttatacaccggactcatgctactaataacatcaatcataggttgataatatgtcgagttaattgcattaaatggcactatagcatctatcatccattntgcaatggctttgtcacacttttctacaattttcttattgtgcaagacactcttcaagct

SEQ ID NO: 19093 - DNA, 399 bp, Glycine max
  unsure at all n locations
agcttggttacctccttcttcactacatcaagaatcaccgggttgagtcttctctgtggctgtcttactggtttaaccccatcctctaaatttattcaatgcatacatgtggatgggctaatacctggaatgtccgccagggtctagcctatagcctttttatgcttcttgagaatagataacagtttctcctcttgctcatccgcaagggaggcagatataattattggaaaacttttgctatcatccaagtaagcataatttaaatntgatggtagaggcttcaattctggtgtgggtggctggataatggtagaaagagatggtttctcagcctgtaccttataaagaaagtcagaggtatgtgtacttnctganacanntggtagtctatctaac

SEQ ID NO: 19094 - DNA, 345 bp, Glycine max
  unsure at all n locations
tatcttgtttgcaaactggatgcgttggtcaacttggtaacccagctggctttgaataagaaatctgtacctgtcgcaagggtttgtggtttgtgctcctctgctgaccaccatacagacctttgcccttccatgcagcaacctggagcaattgagcagcctgaagcttatgctgcaaatatttacaatagacctcctcaacctcagcagcaaaatcaaccacagcagagcaattatgacctttccagcaacagatacaaccctggatggaggaatcaccctaccctcagatggtccagccctcaacaacaacaacagcagcctgctcctttccttcanaatgct

SEQ ID NO: 19095 - DNA, 422 bp, Glycine max
  unsure at all n locations
gtgtctntntcctttattcttcatgtcatgattgaatgattcattatgtctttccttctcccttctttnttggtccataacaatgattatacaactcgtcattttctctctatgctttgattgaatttcatacacaattattttattaatccaaaccatataaattattacgtgtgtgtaatataaaagcatatttagtaaaaaatattgtttatatgaggataaaataataaatgttgatatttaaattacataagtacataaagctaatgaacacatgtcttttaaatctaatgctagatatacattgcatgataatgccatatatagtggttagtcatgtcttaacttatatatatggattggataaacagaataattggatatgaatacgaataagagcataagacgaggaggatgaa

SEQ ID NO: 19096 - DNA, 325 bp, Glycine max
aagataggaacgggtatgaccacacccgtccgtgaagaattaatggccctgccaaaaaactaccaagacatctttgccttgtcataccaagatatgcccggtttgagttctgacatcgtacaacacagattacctctaaatcccgagtgttccccggtaaaacaaaagctgaggaggatgaagcccgagacgttcttcacaataaataaaagagggtaagaaacaatttgacgctggctttctggctgttgctcggtactcggaatgggttgccaacattgtacccagtcccaagaaggatgggaaggtatgaatgtgcgtggat

SEQ ID NO: 19097 - DNA, 368 bp, Glycine max
  unsure at all n locations
agcttatactcactgagctcttgattgacacaagccttagggtgatgcaatcctactcccaaagggcattggatagaagactccaagaagattgagccagagatgcatgagaaggccctagggttcttatgagccttagggtagattttgggcccatggactcagtatgagcccacttatctttgtatatattagattaaggtttcattatttttgggccttgtatttagggctccatagtgtaaggagggtaccctagtaatgtaggatttttcagcccttgtattttagggtacatagactagttattggattaggggtaattntgtaatttctcatgcattaagtgcactatntgatgtgtgtgt

SEQ ID NO: 19098 - DNA, 328 bp, Glycine max
  unsure at all n locations
tagcttttattttcaatttagagagtctcgatatgttacgagactcaatcggacatctaagtataaagttattgtcgtttgaattctatatgagcttccgttttcaatttggagcgtctcgatatattacaggactcaatcgtacatctaagtataaagttattgtcgtttgaattttctcagagcttctgttctcaatttcgagcgtctccatatattacgggactcaatcggacatccgagtaaaaagttattgtcttttgaatttgatatgagctttccttttgaatntggagcctctcgatatattacaggactcaattagaca

SEQ ID NO: 19099 - DNA, 362 bp, Glycine max
ttctttaaactctgtacaacaatgaagctctgataccacttgttaaacaagtggcctcagatatcttaagaagggggggttgaattaagatattccaaacttttctcctaattaaaaatctatcttactttgtacttaagttatgaattcccttaatgacaatcttcttatatattaattcaaatgaagcagcttgaattatgaatataaagcaataataaataaaggagatctaaggaagagaacatgcaaactcagttttatacttgttcggccacacccttgtgcctacgtacagtccccaagcaacccgcttgagagttccactaacttgtaaattccttttacaagttctaaacaca

SEQ ID NO: 19100 - DNA, 426 bp, Glycine max
  unsure at all n locations
tggaagggtgattatgtttagataacgtttatgtcgagtgtatattattnttctttcaagtttcaattgtacgtagcttgtgtcttcttcacacatagggcatgcataatggcctttaacactatttccactcaaattctcatatgttggaaagtcattaatggtatagaatagcattgcacacaacttgaatgtctcattttaatacccatcaaatacaacaaccccctcgtcccacaactttgtcaagtcttcaatcaagggactgagataaaacattaatgtcaatttctggttgtctcatagacaacatcatgtatgttcgcttcatgcacaaccaatgaggataattgaaattactatcaaaacaggtcatgaactgtgctgagagcttaaactaccatagagattcattccatcactggt

SEQ ID NO: 19101 - DNA, 431 bp, Glycine max
  unsure at all n locations
ntgagccaaaatcctgactcaccatanaccttgacctcaggtgataatgccaatccttaccctcggaagcaaaaaagaatagaggggaaatttccaatcaaagaaaaagagaaggataatttccaatgaaagcaaaaaagaaatgaaggaatattccccaatcaaagagtgggagatagcaaaaaaaggaaaagaaggaaaattccccaatcaaagagtgggagatagcaaaaagaaaagatagataattcccaaccaaagaatgggagaaagtaaaaaaggaagagaagatagcttctggtcaaagataccagaagatatgtgcagagaggtctttagaaccgacaatatctgaacaatacagaattgtcactaaatgaacaaaaagaaggataggaaaccgtgacctanaatggtcttctccctttaat

SEQ ID NO: 19102 - DNA, 419 bp, Glycine max
  unsure at all n locations
ttatggagaaacagtacacatttgatagttnctggtcctggctntagccacttggtcccaattcttcagttctccaagagacttgttcagctccatccaaactntcatgtcacatgcctaattcccacactcgtgtctcccccaagtgcctcaatatccatccttcaaactcttccaccaaacatcaacactatttttcttcaaccggtgaaacctgaggacctaccacaaggggctaccatagaaactcaaattcagctcatagtggctctctctatgccctccatacatcaggccctgaagaccttaacttcaaggactcgctntgtggccttggtggctgattcttctgcctttgacgcattagatnttgctaatgagttcaacatgttgtcctatatntacctccccatatcagc

SEQ ID NO: 19103 - DNA, 468 bp, Glycine max
actcagcttgtcaaaagggaagcaagttaagaaatcctttcaaagcaaaaacgttgtttctacttcaaaaccccttgaactacttcacattgatttatttggtccctcaagaactatgcgtttaggtggaaattactatggcttagtaatagtagatgattactcaaatttcttggactttgtttttgaaaaccaaaaatgaagcttttgatgattttcacaaacttgccaaggtgattcaaaatgaaaaaggtctcaacattgtttcaattagaagtgatcatggaggtgaatttcaaaatgacttttatgaaaaaaatgaaattcaccataatttttctgccccaagaacatctcaggagactggtgttgtggagaggaaaaatagatccattgaataaggtgcaagaaaccttctaaatgaaacaaggttacctaagtacttttgggaagatgtatacatactat

SEQ ID NO: 19104 - DNA, 432 bp, Glycine max
  unsure at all n locations
gaatgctttctgtcttgtgccaatggaataaattgacttgtcgccaagttttggactggttcctgaaccataatgatactggtcaatctttagttcaaatggacaagctaaatgtgaaatctaattgtcacctatacaggaatttggagggaagagtggaaaggcggcagaaaacagaactcatacctgtagtgtcaagcacagaagaatgacttttctttaaattccccagactttcttcttcaaaacgttcacgaccctcagagagtatgccaagataagcatacacattggtctgaatggtcaactntatattntcacgttcatcttctgannagggggtgcttttgtaaagaatcttggcctgacataagcatttacaattctataaatacattgatttcttggctttcttcaacaacaacatgcatg

SEQ ID NO: 19105 - DNA, 401 bp, Glycine max
tgaatcggacatccgtgtgagaagttatgaccatttgaatttctcaagagcttccgctgttcattttcgatcctctcgacatattatgcacccgaatcggacatctgtgtgagaagtcatgatcatttgaatttctcgagagtttccgatgtataatttcgagcgtatcgatatattataaccctgaatcggacctcagtctgaaaagttatgaccatttgaatttgacgagagcttccgttgttcaatttcgaatatcactgtatgtgatgcgcctaaattggacattcgagttaaatgttatgaccatttgaatatctcaagagcttccgttgttcaattctgagcgtctcgatatgtgatttgcctgaatcggacatccgtgtgaaaacgtatgacca

SEQ ID NO: 19106 - DNA, 384 bp, Glycine max
  unsure at all n locations
tagcataactaattccctgaatgacaaaagtcaatagttgaatatgataaccaagttaatactgtgggtgaacatttgttatgcgagaacaagttcgagcagattgtctccaatgaagaatgtaagtgttgtactttgtaacagacatagaaaagaggcagagtgagaacttgacaaaacctgcgggatggccaagctagcaatagtgatgccggacacaaggtcagatttgaagagtttgagattatacttangaccccattggagaatagggaacacatattgagctccaaggatcagttntctcttaagaggttgtcccttgaattggcgcagaggatcatcanggaagaaagtttccttgagcctacccttgagtttctg

SEQ ID NO: 19107 - DNA, 354 bp, Glycine max
  unsure at all n locations
tccttgagaagctagagcttagctacacacacccatctaagaactaagctcacctccttgacaaaatacatganaatacaaaaaanaaaaagtccctacaacaaagacaacccanaatgccctcaaatacaaggctaaaaccctatactacaagaatggccaaaatacaaggcccaaaagaaggaaaaacctattctaatatttacaaagataagcgggctcatacttagcccatgggctcgaaatctaccctaaggctcatgagaaccctagggccttcccttggatctctagcccaatcaacttggagtcttctacccaatgcccttgcggtgtangattgcatcaatatgt

SEQ ID NO: 19108 - DNA, 420 bp, Glycine max
  unsure at all n locations
agcttctcttttcttgtttaattattatattttgtttttaatccttgtatttggctgtgtttttatgacatttgagcacttattatttctttttaatatttgtttagtatgactgaatatgatgattatatttactatctcttggttgtttatggttatgaattttaaacttagttattttgataatatatgatcagtggtatgtacttttatttggttattatgagtgacttttctggattatatgacattctatgaagtatatctttctaagattgatgaatggttaagttatcttgtttgattgttttctattctcttgtatgattagtaatttatgtatgttttatatttgttatgcattttggctttntgttgatgccaaagggggagagaaatanggattaaatcaagaactcg

SEQ ID NO: 19109 - DNA, 427 bp, Glycine max
  unsure at all n locations
agcttagattctttctaacgacaataactttttactcggatgtctgattgagtcccgtcatatatcgagacgctcgaaattgaatgttgaatctcttaaccaatccaaacgacaataactttttactcggatgtctgattgagtcccgtaatataacgagacgctcaaaattgaatgttgaagcttagagccaattcaaacgacaataacttattactcggatgtctgattgagtcccgtcatatatcgagacgctcgaaattgaatgttgaagctcttagccaattcaaacgacaataactttatactcgaatgtctgattgagtcctgtaatataacgagacgctcgaaattgaatgttgaagctctgagccaattcaaacgacaataactttntactcggatgtctgattgagtcccgtcatat

SEQ ID NO: 19110 - DNA, 413 bp, Glycine max
  unsure at all n locations
agcttagttctagaagggatggaccttttcaggttttggagaggatcaataacaatgcctataggttggacctcccagaagagtatggagtcagcaccacttttaacatttctgatttaactccttttgcaggtggagctgatattgaggaggaggaactaacagatttgaggtcaaatcctcttcaaggggaaggggatgatgcaatcctccctaggaagggaccaatcactagaaccatgagcaagaggctccaagaagattgngctagagctgctgaagaaggccctanggttctcatgaaccttanggtagatttctgagcccatgggccaaggttgggtccaattatctttgtacatattagactangatgtcattatatntggtccttgtatatanggctccatatt

SEQ ID NO: 19111 - DNA, 362 bp, Glycine max
  unsure at all n locations
agcttgattttgttcatcggaagctcttgagaaattcaaatggtcataacttttcacacggatgtccgattctggcaaatcacatatcaggacactcgaaattgaacaatggaagctcttgagaatttcaaatggtcataacttttcacacggatgttagattaaggcgcatcacatatagagacgctcgaaaatgaacaacggaagctctggggaacataagatggtcataacttctcacactgaggtcctattctggcttataatatattgatatgctcgagattaaacatctgaagctctcgagaaattcanatggccataactattcacacggatgtccgattcgggcgcataatatg

SEQ ID NO: 19112 - DNA, 311 bp, Glycine max
agcttgttttgatatcaatcttgccaaagagatactcgtttttggactgaaaccccgagccagaggctttgtcaagggaaagagtgagaagatcgccgttgttgagtatcttggcacgaccatctccccaagttacgtcaaaatcctggtagaagttgccagcagaggctgcgatggaagaggccaatacaaatacataaaggacagtttttgttgaaaatgtaatggaatgaagagaagccatgattgttttgaatgaaatgtagaaagaggaagttaaaaatgtagtagcttggtagaagtaatgaaat

SEQ ID NO: 19113 - DNA, 406 bp, Glycine max
  unsure at all n locations
agctntgattgatttgacctgaaatgttgtttagtgagagatcaagggattctaacaatttcatttttcccatgtcatttggtatccctccaaacagatgatttctagacaagttcaaaaaccgcaaagcagatagcttggaaatttcagatggaattgctccagacagcttattacttgaaagatcaatcattctcaccaatatcagattgtctctgtactctaactcatctcctttgggaactaagacaagagtttccttgtagtggttataactgaagtcagagccatatgaataacttanagggttggcaaagaagtcatcttcaccagccattgtcttcatgtcatccaaacaatntggaatggatcctgacaggctgttattgccaagatccagcactat

SEQ ID NO: 19114 - DNA, 366 bp, Glycine max
  unsure at all n locations
agcttcaagagattcattttctcgacaatattattggtgatatctcanaaggggtaacaactagacattctcttaaagatttatgcaataatatggcttttgtatctatgattgaacctaaaaatataaaagaagccataatagatgataactggatcattgccatgcaagaagaactgaaccaatttgaaagaaacaatgtatggaaattagtagaaaaacctgaaaattatcctatcataggaacaaaatgggtttttagaaataagttagatgaacatggtataattattagaaataaagccaggttagtagcaaaagggtataatatagaagaaggaatagactatgaagaaacatatgctc

SEQ ID NO: 19115 - DNA, 415 bp, Glycine max
  unsure at all n locations
agctntggtgtcttactttcgaccataactttttactcggatgtctgattgaggctcgtaatatatcgagacgctcgaaattgaatgttgaagctctgagccaatacaaacgatactgactttttactcggatgtctgattgagtcccgtaagatatcgagacgctcgaaattgaatcttgaacttctgagctaattcaaacgacaataacttttttctcggatgtctgactgagtcccgtaacatattgagacgctcgaaattgaatgttgaacctctgagctaattaaaacgacattaactntttactcagatgtctgattgagtcccgtaacttatcgagacgctcgaaattgaacgttgaagctccgagccaatacaaacgaccataactgtntactcggatgtctgattg

SEQ ID NO: 19116 - DNA, 369 bp, Glycine max
  unsure at all n locations
agctttgtttgtgttgttccaatggttgcaataccacaagaggctgaccaaagcactaatgcccagcatattgtagatgttcggaaggcgggaatcaaaccttcagttgatgataaacatgttgtgagacgagaagcgttgaagcgttgtacatgggaagtaatggacagtgacagaggcgaagagatgaagatatacgccatgcacctgaagacattggctgcatacgctgctggtgacggtggaatttctcatagaaacattactgaatttgtgaataacttgttccattngtaattaatgcactcaacctcatattacttcttatttactcagtcacacaccgtgcgagaatttacagttgtttca

SEQ ID NO: 19117 - DNA, 407 bp, Glycine max
  unsure at all n locations
agctttgattgatttgacctgaaatgttgtttagtgagagatcaagggattctaacaatttcatttttcccatgtcatttggtatccctccaaacagatgatttctagacaagttcaaaaaccgcaaagcagatagcttggaaatttcagatggaattgctccagacagcttattacttgaaagatcaatcattctcaccaatatcagattgtctctgtactctaactcatctcctttgggaactaagacaagagtttccttgtagtggttataactgaagtcagagccatatgaataacttanagggttggcaaagaagtcatcttcaccagccattgtcttcatgtcatccaaaccaattggaatggatcctgacaggctgttattgccaagatccagcactata

SEQ ID NO: 19118 - DNA, 415 bp, Glycine max
  unsure at all n locations
agctntggtttttatgacttgctccaatggctcatcatgtcttctattgaacctttcttcatagacttgaagagaacccatcaattggtctacggtcattgagtctaaatccttagactcttcaatagcacaaaccatataatcaaatttagcgattaaggagcgaaggatcttttccaccacatgaacatcttccatattttctccataatgcttcatttggttcacaatagccaacaccttgttgccaaaatctgagatagattcggattccttcatatgcaatgattcaaactctctacatagaatgtaacttcataccttgttttcccaacatgacaatattgaaagcataaattttgtgaaagcctaatcctccaaaccccttgttcattgacattntactccatctcat

SEQ ID NO: 19119 - DNA, 429 bp, Glycine max
  unsure at all n locations
cactcggacccgggatcttaagcactgagctcagctttttttatgccctgatcgactcgagtaagtatacataaattctagagcttcgttgttaattccgtgcgtctcgatatattatgtgcctgaatcggacctctgagctaaaagttatgaccatttgaatttctcgagagccttccgttgtcaatttcatgcgtctcgatatattatatgcctgaatcggacctccgagttaaaagttatgaccatttgaatntcttgagagcttccgttggtcaatttcgagcgtctcgatatattatgtgcctgaatcgaacctccgagtgactatgtatgaccattngaattgctcaacagcttccattggtcaatctggagcgtctcgatatattatgcgcctgaatcggacctccgagtaaaacgtatgac

SEQ ID NO: 19120 - DNA, 310 bp, Glycine max
agcttctcatatgtgtttgcacctaaatcggtcatccgagttagaagttatgaccatctgattttctcccgccgtttcttttctcaattccgagcgtctcgatatattatgcacctgaatctgacctccgagagacaagttatgactcatgcgaattgctcatgagcttccattgttcaatctcgagcgtgtcgatatattatgcgcctgaatcggacctccgacttaagagatatgaccttctcataactcgatagctcccgccgttcaatttctaacgtctcgacatattttgcgctcgaatcggaca

SEQ ID NO: 19121 - DNA, 413 bp, Glycine max
agcttgaatcatttctgtatgcattggataactgggcgacccatctggccttgaatcacacattcgcacctgtctcaagggtttgtggtttgtgctcctctgctgaccaccatacagacctttgaccttccatgcagcaacctgtagcaatcgaacagcctgaagcttatgctgcaaatatttacaatagacctgctcaacctcagcaacaaaatcaaccacagcacaacaattatgaccttcccagcaacagatacaaccctggatggaggaatcaccctaacctcagatggtacattcctgagcaacaacagcagccagctctttccttacataatgctgttggcccaagcagaccatacattcctacatcaatgcaacaacagcaactactctaataactagcaacaact

SEQ ID NO: 19122 - DNA, 406 bp, Glycine max
  unsure at all n locations
agctttcanattaagttgcctaatgcctaaaatgttttttctgatggtagtggtcctagatgcagggaagaatttctccaagaacaccttcttaaggtcatcccaactgaaaatggacctgcgagcaaggtagtatagccaatcttttgccactccctccagagaatgaggaaaagcctttagaaagatatgatcttcttggacatcagggggcttcattgtggaacaaacaatatggaaccccttaagatgcttatgaggatcttcacctgcaagaccatgaaacttaggcaacagatgtattagtccagtcttgagaacatatggaacacccttatcangatattgaatgcacaagctctcacaagtganatcaggtgcagccatctccctaagagtcctctca

SEQ ID NO: 19123 - DNA, 393 bp, Glycine max
agcttcattctgccatcatattcattgatgaagtagacagttttttgggtcagcgtcgtggaacagatcacgaggctatgttaaacatgaaaactgaattcatggctctgtgggatggatttacaacagatcgtaagtttaacagttatcatattttattttgttgcataaatattgaaaataagttgcaaataagataatgacaattttgatagagatttagttggtaacataatgttctcaatttatttatatttgagtagatttgttgattggggtgacttattgtgtgtgtagagaatgctcaagttatggttcttgcagcaactaatcgtccttcagaacttgatgaagcaatacttcggcgtcttcctcaagcctttgaaattggaa

SEQ ID NO: 19124 - DNA, 428 bp, Glycine max
  unsure at all n locations
agctntacttcttatgccactctactccaaattcttgaaggatatgttaacaaggaaacataagtatattcaccaggaaaacatcgtagtggaaggaaattgtagtgctgtgattcaatagatccttccacccaagcataaagaccctgngagtgtaactattccttattcaattggagaagtcactgtgggaaaggctcttattgacctgngagccaacattaatttaatgccactctccatgtgtagaaggttgggagagttggagatcatgcccactangatgactntacaacttgttgatcgctccattaccagaccatatggagtaattgaagatgtgctggtcagagtgaaacattntatcttcccggcagactntgtagtaatggatatctgtgaagatactgacattcctgtaatattgg

SEQ ID NO: 19125 - DNA, 421 bp, Glycine max
agcttatatttattgtagggagaataaaacaatccaaaatcaattgtacctttcaagtaacgaagaattctttttgcggcttttagatgaggagaggtaggagcctccataaagcgacacacaactcccaccgcatatagaatatcgggccttgtattggttagataccttaaactccccacaagactcttgaagatcgtgaagtctaccttctctccttcatcaaactttgataacttcaagccaccttccataggtgtgttcacgggattgcaatcaagcatattaaattacttcaacacttcttttgtgtacctttcttgtgagacaaagataccattctccgttttcttcacttccattcacaagtaatatgacatgagtcccatatctgtcatatcacattcacgagacatggact

SEQ ID NO: 19126 - DNA, 385 bp, Glycine max
  unsure at all n locations
agctttggttaattttatttactgganaaagctatggggtgcttgttttgggagagtactgcaccaatgctagatccttangcatttgtttccatggtgaaaggtttagagaaattgagtatgcatagcactggggctgagctaactgcctcttgtaacgcgtgaaaggctagcatggcctacggtgaccacacaaggtgttccttggtcaagagatgaatcacaggggttgctatggtagcatattctctgatgaaacatctatcataacctgtgagacccatatatccccacagggttctaaaggaggtgggtcgcggccattgatgaatggcaagtatcttgtcacgaacgggatgaacaccgcgaacggataccacatgac

SEQ ID NO: 19127 - DNA, 417 bp, Glycine max
  unsure at all n locations
agcttgtgtctatctttctattgtcgaagctgaatacatagctgcaagaagttgttgtgctcaaagtctttggatgaagcaacaatgatgtaagctccattggagcttgtaggcctaggatcttcttcatcaatggattcctttgcttcttggaagatgaatggcagcggaatggagaaaggaagagagagaggagacgccacttcaaggagaagatgagtctagaagaagctcaccaccataggaggccatggataagagcttggaggaagaaggagatgaatgaagggagagggagagaagagcacganattntgtgctctanatgagctttgagatctgaagtttaatattcanatgatcaaagttganaaanatgcacacacatgacctctatntatagcctaagtgtcacac

SEQ ID NO: 19128 - DNA, 403 bp, Glycine max
agcttgctacttctggaagctcctaatatctcccacactttttggggtgggccattcttggatggccttgattttctcagggtccacttggaccccatttctaccaactacaaaacctaagaagactatattatctacacaaaaggtacacttctctatatttgcatagagggtgtttttcctaaggactgaaagaacttgcctaagatgtcctaagtgatcagctaggcttctactgtacactaaaatatcatcaaaataaacaactacaaatctacctatgacatcccttaagacatgatgcataagcctcataaaggtgcttggtgcattagtgagcccaaaaggcatcactagtcattcatacaaaccaaacttggtcttgagagcgatttacactcat

SEQ ID NO: 19129 - DNA, 382 bp, Glycine max
agctttgagcaaattgaaatgacaataactttatacacggatgtccggttgagtcccgtaatatatcgagacgctcaaaatttagatccgaagctctgagaaaattgaattgacaataactttatacacggatgtccggttgagtcccgtaatatatcgagacgctccaaattgaaaacggaaactcttagaaaattcaaacgacaataactttttactcggatgcccgacagagtgtcgtaatatatcgagagacgctccatattgactatgaacgctcgtatcatatgtaaacgacaataactttatactcagatgtctgatagagtcccgtaatatatcgagacgctcaaattttagatccgaagctctgagaaaattg

SEQ ID NO: 19130 - DNA, 445 bp, Glycine max
  unsure at all n locations
cttgtgacaacttcatgtgctactcaatgttctgaataactttttactacttatcttgattgactcttttcttgagtcttgagtcttgatcttgattattcttgattcttgattcttgaaacttgaaacttgattcttgaattgttcttgactcaatcttgaagtcattctcttgngctttttgtcatcatctgtgttatcatcaaaacaccttgaatcaatcgcgacctatcatctgaatcaatcttgattcatgactcaatcttgattcaatcatgaagcttgcttctgcacttatgcgtcatgtcttagaggatctcataggtagatttgtagttgtctattttgatgatattttagtgtacagtacgagcctagatgatcacttacgacatntcatgccagttctttcagtccttangaaaaacactctctatgcaaatat

SEQ ID NO: 19131 - DNA, 453 bp, Glycine max
ctaccagacagatcagccaaaagtgctcgagctggcccctacaaattaaattgaagaaataaaggggaatttagttttcagctgcacaactgaatcagtatgaagttaatataacagaagcacatgtcaattactttaacaagcttacctgcactgtgttgttagcaaggtccagcatccagaacccaagaataaatacaagagcagcccttgttcgggtccctttaaatgttcttaatttcagacagaatttcattaatgtctaactaaggtcatcatatctgtgaattttaaaaagacagaaataaaatgagtaacgaaataacgaaaggatgagataagaaacctgcaatgctcgtgtgtatcacctaatacatatccaatgtctgcagaacatccgattaatatcacctacattacaagacttgacttaccatatgtgtaatgtagcat

SEQ ID NO: 19132 - DNA, 375 bp, Glycine max
agcttgtgatctattacacaagtcttgtaatcgattaccagaggagattttcagaaaataatttccaagagtcacatctattcaaatggtttatgaatggccatcaaaggtgacttggaaacacgaatttaaagagagttttcattgcccacaaagtttatcctctcaaaagattaagagtttttctgaactgaactgtcttatcctctcaaaaagattccttggtcaaccacttgcatattcaataaggaattttgattggtcttcattgtacaatctatcccttttaagagagatttcttcttctcttcttcttacttctgaaaagggattaagagactgagagtctcttattgtagaggattcttgaacaca

SEQ ID NO: 19133 - DNA, 323 bp, Glycine max
agcttgaaggcaaactggatgcattggttaacttggtaacccagctggccttgaatcagaaatctgtacctgtcgcaagggtttgtggtttgtgctcctctgctgaccaccatacagacctttgcccttccatgcagcaacctggagcaattgagcagcctgaagcttatgctacaaatatttacaatagacctcctcaacctcagcagcaaaatcaaccacagcagaacaattatgacctctccagcaacagatacaaccctggatggaggaatcaccctaacctcagatggtccatccctcagcaacaacaacaacaacct

SEQ ID NO: 19134 - DNA, 432 bp, Glycine max
  unsure at all n locations
tctgtccctgaganactggttcccagaagacaacagggagtgaagattgctgaaaaccctagccttgcaacaagtcctagggaagtagacacggagatggacaagaaaatccgcagtattgtgagtagcattctgaaagatgcttctgttcctgaagctgatgaagatgtcccaacatcgtccaacccaaatgtttctgtgcctgatgttgagaaagatgttccaacatcttccgcccaaatgctgagtactctcttcccccagcaaagagagatcaacagaggaagatgatcaagcgacaaaggagacccctgcaccaagggcaccagaacctgctccaggtgacctcattgacctgcaagaagtagaatctgatgaggaacccattgccaacaggttggcacctggcgttgcagaacgattacaaagccg

SEQ ID NO: 19135 - DNA, 393 bp, Glycine max
agctttccctctttgaacaaatacccctcagccaaataaaatccatcttgggccttttgcccataactctcattaatgggagagaaatgttcatctgaagcatacaattccctaatgttatcaaatcctaaaatttgagctccaaaggagtaaaacaatgtgtgcctgctagagagggcatcaactaccacatttgtttttccctttttgtttttgataacatatggaaattactctaggtactctacccattttgcatgcctttttttaacttgctttgcgctctaatgtattttagtgattcatgatcactatgaatgacaaattccttggaaacaagataatgttcccaagtttggagggctattattaaggcaaaaagctctctatcat

SEQ ID NO: 19136 - DNA, 454 bp, Glycine max
  unsure at all n locations
tatgctgcacacatttataatagacctcctcagcagcaaaaccaacagcaatagaataatcatgacctttcaagcaatagatacaatccaggttggaggaatcatccaaatctaggatggacaagtcctccacaacaacaacagtctatccctccttttcagaatgctgctggtccaagcaagccatatgttcctcctccaatgcagcaatagcagcaacaacaacaaagcaacaagcaactatgcctctcctcaaccttacttaaaagagttagtgatgcagatgaccatccagaatatgcaatttcagcaagagacaagagcctccattcaaagtctgacaaatcagatagggcagatggctacttacatgaatcaagctcaatcccaaaattctgacagattgccttcacaaactgtgcagaatgcanaacatgtgagtgccatcaccttg

SEQ ID NO: 19137 - DNA, 392 bp, Glycine max
agcttctggtgggacatcttgacttgctttccaatctgacattcaccacagattctgccttcttctattttcagattggggatgcctctaacagcacctttgtcaatgattttcttcatgcctcttaagtgcagatgtccaaatctttgatgccatattctgacttcatcttctttggaggatagacatgtggaggagtagctggtttcttggggtgtccataggtaacaattgtcctttgatctgctgcccttcattagaacttcactcttctcatttgtcaccaagcattctgactttgtgaagtttacattgaatccttcatcacacagctgactgatgctaatcaagtttgcagtcagtcccttcaccagcagtactttgttcagact

SEQ ID NO: 19138 - DNA, 452 bp, Glycine max
  unsure at all n locations
tctgttctcaattgcgagcgtctcgatattgtacggcgttctatccgacatccaagttaaaagttattgtcgctggagttttgtaagagcttcccttttcaattacgagcgtctcgatatattacgggacacaatcggacacccgagttaaaagttattgacggttgaatgcgctcagagcttctattttcaattacgagcgtctcgatatattacgggactcaatcggacatctagccaaaagttttgtcgttcgatttttctgagagcttctgttntcaatgacgagcgtctcgatatactaccggactcaatcggacatccgagttataagttattgccgtgagaatctgctcagagcttctgttttcaatttcgagcgtctcgatatactacgggactcaatcngacatgcgagtgaaaagttattgtcgtttggattggctcagagc

SEQ ID NO: 19139 - DNA, 388 bp, Glycine max
agctttgatgcaacattgggagaggttaatgaaacaacgagatgatgcgctccatgagaggttggatcaaatggagaatagagatcacaatgaagaagaaaggatgagaagatggaatgatggtgttcctagacaaaaccgaattgatggtattaaactcaacattcctccatttaaaggaaagaatgatccggaggcctacttggagtgggagatgaaaatagagcatgttttctcatgcaacatctatgatgaggaccagaaggtgaagcttgccgccacggagttttccgactatgctcttgtgtggtggaacaagctacagaatgagagagcaagaaatgaagagccaatggttgatacatggacggagatgaaaaagatcatg

SEQ ID NO: 19140 - DNA, 390 bp, Glycine max
agcttgcaaaatggaagcaaagaagtctatctatggggggcagaatcactctcattaattcagttttatcagctttacctatctttttactatctttttttaagatccctaaaaaagtggtgcaaaagattgtatcaattcagagaaatttcctttggggaggtcatcatgaggccaacaagattccttgggtgaagtgggacacaatttgccttcctaaaaataaagggggcctagggattaaagatctctaaatttaatgaggctttacttggcaaatgggggtgggagctgactaataatcagaaccaaccttgggcaagaatcttactctccagatatggtggcgggaaggagttgatctttggtggaaagagcaaatcttcctct

SEQ ID NO: 19141 - DNA, 275 bp, Glycine max
taccctgatgaggattgtccatatgttcttaaaactggactgatccttttgattccaaagtttcatggccttgtaagtgaagacccacacaagcatctgaaagaattccatattgtctgctccaccatgaaaccaccagatgtccaggaggatcacatatttctgaaggcctttcctcattctttatagggaagtggaaaggattggctatattaccttgctccaaagtccatcacgagctgggatgacctcaagagagtattcttaaaaaaaaa

SEQ ID NO: 19142 - DNA, 409 bp, Glycine max
taacacatgtttccatgttcaaatcaaatcagtgttaagacatagtttcgaaacactgggttgcctcccaggaacacttctttaatgtcttttaagttggatgtccttgttatgacttacgccttcactgtttcatcatccataattcttttcttctttgtaagaaaatacttcatgaatttagtgtatgttggtatatgctctaatgccttacaaaaaggaatgttacctcctgtcgttcaaaatgtttaagaaacacttgtatttcctttccttatatttctttgacggagcatacacataaggaagatgctcaagtggcggatggcttactacaactctacctttgctagtggcttctttctttgatttcttcttgacgtaccactctctcttcaactttttcagt

SEQ ID NO: 19143 - DNA, 444 bp, Glycine max
  unsure at all n locations
tgataatcattntctttgcctcataaaatgaacttggaagctttccatgttcaaatgcatcttgcaagagttacaaaatcattgccatggctttgtcattcatcccacacatgcatttaatatgatacaatttcaacaaaaaagacaaccttgaatattttgaaccttcatacaagggttgttctgcatcttttggtaattcataaaactcttcggcttcattcctttctgagtgttttttgaaccatatcttcatccctatcaacctctacattgaagcaatgggcacttcattcgtatgctgcctatcaactctaaaagcatcattaatcatattttggataggatntttaataatgttgtcttgaactacatttgtatgtgagacatttcgagtttcttcacttctagactccccatggtacaaccaaaatgtgtacccta

SEQ ID NO: 19144 - DNA, 382 bp, Glycine max
agcttggttacctccttcttcactacatcaagaatcactgggttgagtcttctctatggctgtcttattggtttagcctcatcctctaaatttatccgatgcatacatatggatcggctaataccaggaatgtccgctagggtccagcctatagccttcttatgcttcttgagaactaataacaacttctcctcttgctcatcagcaagggaggcagatataaatactgttaaactttttctatcatccaagtaagcatattttaaatttgatggcagaggtttcaattctggtgtgggtggctagatagtggtagaaagagatggtttctcagcctgtacctcataaagaaagtcagaggtatatgtacttcctaaaacat

SEQ ID NO: 19145 - DNA, 442 bp, Glycine max
  unsure at all n locations
tcatagggagtcatgctaatggtagagtgaaaactattgttataagtgaactttatcaacggcagaaaactctaccaattccccttttgttctaagacacacgccctcaaaaggtcctccagtgactaaatggttcattcagtctgagggtggtaggctgaacttagcctaagcttagttcccaacgctttattcagactctcccaaaatctagagataaacctaggatcctatcacacacatgctatatggcacaccatgtaatctgacaatctcaataatatatagggaggtcaacttctccaaggaaaatcttatattaatgggaatattgtgagcaaacttggtcagtccatcaataataacctagataaaatctaaacctctgggggtcctaagtagtcctaccacanaatccatggaaatactatcccacttccac

SEQ ID NO: 19146 - DNA, 385 bp, Glycine max
agcttgtagggttaaagtctcacgattgtcacgtactcatgcaacaattgttagccgtggctatacgagacatcttgccaaacaaattcaggttaacgataactcgcctgtgctttttcttccattctatatgtagcaaagccattgatccagtcatgtttgatgagttagaaaatgaggccgcaattataatgtgtcagtaggagatgtattttccccctgctttctttgacatcatgattcacttgattgtgcatctggtcagagaaatcaaatgttgtggtcctgttcatctacggtggatgtacccgattgagcgatacatgaagatcttaaaagggtatacaaagaatctatatcgtccagaagcatctattgttgagag

SEQ ID NO: 19147 - DNA, 419 bp, Glycine max
ttgataaccttcgatagtgaccagtgaggcctaacaaacctctcagctgctggatattgaaacgtgtcagccactctacaactgactgcaccttaatagcatccatatccactccttcaccagaaactatatgtcccaactgctctatcttcaatacaccatcagagcattcagacaacttatcacaaaaaacattgtctttcaacactttcaatactcctccagatgcataagggtccatgccatgtggaactatataccaatatatcactcaataaccataacacatattgccttacagcatgctggataatatggctcatcatacactgaacagaattcgtagcattggtcaaaccaaaaggaactaccaaccactcataatggccatgagggagcacaaaggctgatcatgtcta

SEQ ID NO: 19148 - DNA, 391 bp, Glycine max
  unsure at all n locations
agcttatgggttgcctcttgtatgcaggaaggctggagagctctccttattctgagctgttgtccccaattcattgggagatgacaaccgaagagctcgcacgacagttctgcactctcttgggtcagtcctatgagaacccactgagtgtagcagttgcagcaggagttgaggggttgcctatactgttaaagctggcaaatgtaatggcagcaaagaagcaggagtggcaggaaatgaagcagttgcctgtgccagttgaattgggtaaggaatttcagttccattcgatttttgtttgccctgtgagtagggatcaaggaagtgaagaanatcctccaatgctgctaccatgcttgcatgtcctttgcaagcaatcaattatgaagct

SEQ ID NO: 19149 - DNA, 392 bp, Glycine max
  unsure at all n locations
agcttctggtgggacatcttgacttgctttccaatctgacattcaccacagattctgccttcttctattcccacattgggaatgcctctaactgcacctttgtcaatgattttcttcatgcctcttaagtgcagatgtccaaatctttgatgccatattctgacttcatcttctttggaggatagacatgtggaggagtaactggtttcttgaggtgtccataggtagcagttgtcctttgatctgctgcccttcattagaacttcactcttctcatttgtcactaagcattctgactntgtgaagtttacattgaatccttcatcacacagctgactgatgctgatcaagttagcagtcagtcccttcaccagcagtactctgtccagact

SEQ ID NO: 19150 - DNA, 471 bp, Glycine max
  unsure at all n locations
tagagcaatctgaactttccaagtgatcaccaaaggcttctgcatcaacattgacactctccaccctctntgctttaagcttttgtgctgcattccctgcttcctccttataaatctcagatttattagaggttgcagcagcacaatcaagtgaatcatgatgtctctgaccagatgcacaatcaagtgaatcatgatgtcaaagaaaacaagggaaaaatacatctctaactagcacagtatcttgcggcctcatttccagctcatcaaacttgacaggatcaatgacttttctacatataccatggaagaaaaagcacaggtgagttatggctaacccaactntgtttggcaagatgtctcgtatagccacggctaacaattgttgcatgagcacgtgacaatcgtgagactntaaccctacaagcttaagctccttgaactacacaaggctcttaatatttgaagagt

SEQ ID NO: 19151 - DNA, 423 bp, Glycine max
  unsure at all n locations
tattgaatntatctctatagagtgtacaacaacgagagagatggactagcaaatcaagacaagcttcattgtgggagaaggctcatgaacgtaatgctaagcgtgttctaaatttgataatagagatggaaggcttatgggttaaacttgggcaatatatgtcaacacgtgcagatgtgcttcctgctgcctatatacgtcttttgaagcagttacaggactctcttcctgctcacccttggaagagtttttcttcaattttttttattttaaaaatattctagtttatgttatggaagaaaaaatgcttttaggaaacaatgtacattatgtggctgtaataaaaagagccccacatattctntgagcattgtagatgattgttgttcattaacctactacaacaattcaaagtcttttctt

SEQ ID NO: 19152 - DNA, 381 bp, Glycine max
agcttatgacaattagaaattctcgagagcttccgatgattaattttgatcgtctcgatatattataagtctgaatcggacctacgtgtgaaaagttatgaccatttgaattttttgagagattccgttgtttgaatttcgagcgtctagatatattatgcgcctgaatttgacttgcctgtgaaaggttataaccatttgaatttctcaagagcttccgttattcaatttcgagcttctctatatgtgatgcgcctaaatcggacatccgggaaaaaagttatgaccatttgaaattctcaaaagcttcggtagttaaatttcgagcatctcgatatattattcgcctgaatctgacatccgtgtaaaaagttatgacca

SEQ ID NO: 19153 - DNA, 370 bp, Glycine max
tcatcactaatttacaagagaaataggaatctatcacagatttagagagtggaccggaaatttatgagtgtatagataataaaatctataaatattatactctaataaataagtttattaattacttacgacatattatagctttttttaattgatcatatgttattctcttcttgacaatagattacaaatcattgatgataattgctatcgaccgatgagttaatttcgtatgacctttccacctacaatacgacaaccttattatactagaaacaaaatgttacataaaattttatattggtgtataatttataatagtcataatgcctgaaaatttgaaatgaacttttaggactattatatatat

SEQ ID NO: 19154 - DNA, 382 bp, Glycine max
  unsure at all n locations
agcttgtgcatccaataccctgatgaggatgtcccatatgttcttaaaactggactgattcatttgcttccaaagtttcatggccttgcaggtgaagacccgcacaaacatttgaaagaatttcacattgtctgctccaccatgaaacccccagatgtccaagaggatcacatatttctgaaggcttttcctcattcattagagggagtggcaaaggactggctgtattaccttgctccaaggtccatcacgagctgngatgaccttaagagagtattcttagaaaaaattttccctacttccaggaccacaaccatcaggaaggatatctcaggtattagacaactcagtggagagagcctgtatgagtactgggagagat

SEQ ID NO: 19155 - DNA, 456 bp, Glycine max
  unsure at all n locations
tcttcagaaggacgtanattntgtgcttgaccagtcttgtagagaggcatttgaggagctaaggaggaggcttaccacctctcccatcatgcagccatcggattgggagcttccatttgagctcatgtgtgatgcctccaattatgcacttggggttgtttttccgcacagagttatagactatcacatgtcattgcttacgcctcacgcctctagatggagcccaagttaactcaccaccatcgatacgagcttttagctgttgtttttacattagataaatttagatcttattagcttttctcccatattactgtctatactaaccatgcagccttgacgtacctattgaagaagcttgatgctaaacgtagattgatcaggtagatgcttcttcacgagtttgatattgagatcagagacagaagtggtgcacaacatgtggtgactgatcat

SEQ ID NO: 19156 - DNA, 378 bp, Glycine max
agcttaaaagaataatttctagaaagttatccgtttctaaaacgcacttgaacacatctgaattgaagtagatgaaaactgaactaattttgtaagaaagtttttcactgcaaaattataaaatcctttatttgtatcttaagaaattggttattctaatcttagaaacgtcatttttaaaaataatttcacaaaataaatataaaattttcatgtttgcccaaaatttgtcatattgattatcatcttcagagttggttctcatgtgtaacattaaacttaatcaaactaaattacacataatttattatgttttatgtaatatttatccaaatttgataatgtgattttcaggtttagtgttaattctcaagtcaa

SEQ ID NO: 19157 - DNA, 451 bp, Glycine max
tataaactctatacaagaatgaagctcttataccacttgttataccagtggcctcaataacttaagagggataggctcaaaatgcagaagaagtagcaatcaatttaaaaatgttctttaaatggacaaaattgattgcaacaaaataaatgagataagggaagagagaatgcaaacacaatttttatactggtttggcaaagtccgtgcctacgtccagtactcaagtacccacttgagatttccactccctttgtaaaaatccgtttacaaagtctgaaccacacagggacaacccatcccttgtgttcaggaatcattacaacttaagagacccttagtcccttaatcagtctctttgaatgagaagaaagaaagaagaattctctcttgaagagaaggatattacaattgaagtccatggagaaactcttaatagatttgcaagtat

SEQ ID NO: 19158 - DNA, 393 bp, Glycine max
agcttgaatgcaaactggatgcattggttaacttggtaacccagctggccttgaatcagaaatctgtacctgtcacaagggtttgtggtttgtgctcctctgctgaccaccatacagaactttgcccttccatgcagcaacctggagcaattgagcaacctgaagcttatgctgcaaacatttacaatagacctcctcaacctcagcagcaaaatcaaccacaacagaacaattatgacctctccagcaacagatacaaccctggatggaggaatcacccaatctcagatggctagccctcaacaacaacaacaacagcctgctccttccttccaaaatgctgctggcccaagcagaccatacattcctccaccaatccaacaacaacaacag

SEQ ID NO: 19159 - DNA, 382 bp, Glycine max
agcttttggtatcaattacgagcgtctcgatatactacgggacataatcggacatgcgggtaaaaagttattgttatttgaatttgctcatacgttctgttttcaattacgatcgcctcaatatattatgggattcattcggacatccgagtaaaaatttattgccatttgaatttgctacgagcttccgatttcaattacgagcgtcttgatatacaacgaataacaatccgacatccgagtaaaaagttattgtcgttagaatatgcctccagcttctgtttcaatcacgagcgtattgatatattacgggactcaatccgacatccgagtaaatagttattgccatttgaatttgctcatagcttctgttctcaattac

SEQ ID NO: 19160 - DNA, 383 bp, Glycine max
ttccttgtcccttgatatatttgagggacttatggtcattatgaatgacaaattccttgggataaacgcagcgttgccatgtattcaaagcccgcactaaagtatacaactccttatcataagtcgaatagttaaaggtaggaccacttacattttcacataaaataagtcattagatggccttcttgcattcacacagtcccaatcccaacatttgaagcatcaaactcaatctcaaaagattcctgaacagttggtaaccccaccatcggggcattcctatcttttgcttaagaaaattgaaagcttcttcttgtctatattcccatttgaaaacaacatttctcttgaccaccttattgagaggtgctgcaatgtgccta

SEQ ID NO: 19161 - DNA, 393 bp, Glycine max
agctttgatctaccaccaccgcagccaccgtcatcttaattttctattatttaatattactagtacttctctttctagccgtgtatttggctatattaagacatttggataatttagtatttctttatttgcatggtttgaatgaacaattatgaattatattatatgactatgtgtttcatattttttaattattcatatatgttttatttgaatattatgaatgactttttggattataagacattctatgaagtattatctttctaagattgatgaatgacaagttatctttttgattgttttctattcttttgtataacatttatgtatggtttttatatttcttgcctttctaagtttgatgaatggttaaattatcttgtttaattg

SEQ ID NO: 19162 - DNA, 417 bp, Glycine max
  unsure at all n locations
tctatagaaggttcgttcctaatttctctacaattgcatcacctctcaatgagctggtgaagaagaatgtggcatttacctgnggtgaaaaacaagagcaagcctttgctttgctcaaagaaaagcttactaaggcacctgttctagctcttcctgacttttctaaaacttttgagctagaatgtgatgcctctggagtgggagttggagctgtattgttacaaggtgggcaccctattgcttattttagtgaaaaacttcatagtgacaccctccctaccccacctatgacaagagctttatgccttaataagagccctccagacatgggaacattaccttgtttccaaggaatttgtcattcatagtgatcatcaatcacttaagtacattagagggcatagcaagttaaacaag

SEQ ID NO: 19163 - DNA, 370 bp, Glycine max
agctttggagtttccaagtgccaactcgtcttcttctttagtccagccttcttctggcttcaattcttcagtgggctttccttctgtgtccagcatcttgggatgttcccagcctttgatgacagctttccaggttctgctatccactgatttgaggaaggccaccattcttgctttccaatattcatagttgcttccatcgagaattggtggtctgttcactggtccgccttctttctccatgttcatcagaatttatctccctagatctcactatgctatcccgagcgtcgctctgataccaattgaaattctgataccacgggacagatgtcgtaccggatgtcacgacatcacgcttcagaacatg

SEQ ID NO: 19164 - DNA, 421 bp, Glycine max
  unsure at all n locations
tgaaatcgaaaacggaagctctaagaaaagtcaaacgacaataccttttaactcgtatgtccgattgagctcctgtaatatatcgagacgctcgaaattgaaaacggaagctctaagaagagtcaaacgacactaactcttgactcggatgtccgattgagtctcgtaatataccgagaccctcgtaattgaaaacaaacgctctgagtaaattcatacgacaataacttttcactcggatttccgattgagtgccatcggatatcgagacgctcgtaacgcacacggaagctctgcacaagtnaaacgacaataatttttaactcggatctatgatggagccctttaatatatcaagacgctcgaaattgataacggaagctctatgaaaagtcaaacgaccataactactgactctgat

SEQ ID NO: 19165 - DNA, 393 bp, Glycine max
agcttcgacccctccgtcggaaacctagtccagaacttctccttcggatcaaaatcaccctgcttaagctcccgcaaaatcgaagcctccttcccaacagtgtacctgcacaaattaaaagttaaaacccaaaaagcatctaaaattctcaataaaatcaaaaacaaaaagctctagtgcttcattcaccttatccccaattgcagattaagcatcaactcataattcttatgccccttggaaactgtttatccaggtcttttcacctcgctcgagaaaaacaacggttcctctcatctctttctctatacaatccgacgtcgttccgtcgcggtaaaacatcgacgccttcacattatcgataatatcgcacgtgatgtcaccggctccacc

SEQ ID NO: 19166 - DNA, 243 bp, Glycine max
ctatcaaaggcttggcaagacaggtagttgtggatgcattgacgtacacaacagtgacatcatgatactgtactatctatgcacttaaaacgactctattaaagggttaagactacgctactgcatatgtgatctgagatgagatctaccatttatacctgccgaaaggacatacacaatttatgcaccttatcaattatgacgtactcattacctacctctgacttgaaggtgatacatgac

SEQ ID NO: 19167 - DNA, 364 bp, Glycine max
agcttcaacatcagaccacttccagggtgctggaactacttcacatggacttgatggggcctatgcaagctgaaagccttggaggaaagatgtatgcctatgttgttgtggatgatttctccagagttacctgcgtcatctttatcagagagaaatcagacacctttgaagtattcaaagagttgagtctaagacttcaaagagaaaaagactgcgtcatcaagagaattaggagtgaccatggcatagagtttgaaaacggcaagtttatcgatcctgcacattgaacgcatcactcatgagttctctgcaaccatcacaccacctcaaaatggcatagttgaaaggaaaaacaggactttgc

SEQ ID NO: 19168 - DNA, 376 bp, Glycine max
agctttatcttcacagaaatcgtgtgatttttttttctctcggcgagacgattgtgcctaagaaaatctcgagtagttgacatgcgttgcggttcacgccgacgggaacgggtgacaaccagaggattactcccgtcctgatggaggctattagcggcttaatcgaactgtcttgtcatggctgtaccgcggtaaataaaagattcttctctgaagattcgaatcctactgatgaacttattcgttgcagtatgctgtgaatatgaatgcccgctaccttggcatccaccgattgttgtaaagtgaaagctgccggtgcctacactatgaagtaatgcactttttgcttcctatcctactcatacattctgacttt

SEQ ID NO: 19169 - DNA, 416 bp, Glycine max
  unsure at all n locations
tgaaaaaaaccactccgttcaggggattttcttcctgcaccagctatttttcttctagatccaacagtgagagagaaatttcaaaaacaccattccttaagacggatctgtaatggtcttatggaatgtcaatccgtttgtctatacataatttttaaaaatgtattttacaaattaatttaaaattaatagctcatgtagaattcgaacctatgactttaaggttattaacacaacactctaatgccaataagccaattatattataaaataattacattgttttatgtaacactaaaatttctaatgtatatttaatgcacatgtaagtntatataataatttttgtgataattttgatctcataattaattcttttacatatataaatttttattaaacgtataatttttatt

SEQ ID NO: 19170 - DNA, 385 bp, Glycine max
agcttgtgcattcaatatcctgatgagggtgttccatatgttctaaagactagactaatacatttgctgcccaagtttcatggtcttgcaggtgaagatcctcataagcatcttaaggagttccatattgtttgttccaccatgaagccccctgatgtccaagaagatcatatctttctaaaggcttttcctcattctctggagggagtgacaaaagattggctatactaccttgctctcaggtccattttcagctgggatgaccttaagagggtgttctggagaaattccccctgcatctaggaccactgccatcagaaaagatatttcaggcatcaggcaacttagtggagagagcttgtatgagtactgggaaagattcaag

SEQ ID NO: 19171 - DNA, 371 bp, Glycine max
agctttgagccaattcaaacaacaataactttttactcgaatgtctgattgagtcccgtaacatatcgagacgctcgaaattgaatgttgaacttttgagctaattcaaacgacaataaaatttttctcggatgtctggttgagtcccgtagcatatcgagacgctcgaaattgaatgttgaacctcttagctaattcaaacgacaataacttttttcacggatgtctgatagagtcccgtaacatatcgagacgctcgaaattgaatgttgaagcttcagccaattcaaacgacaataacttttttctcagatgtctgattgagtcccgtaacatatcgagacgctcgaaattgaatgttgaagctctga

SEQ ID NO: 19172 - DNA, 426 bp, Glycine max
  unsure at all n locations
taaacattcaatttcgagcgtctcgatatattacaggactcaatcaaacatccgagaaaaaagttactgtcgtttgaatctgctcagaggttaaacattcaatttcgagcgtctcgatatgttacgggactcaatcagagatccaagtaaaaagttattgtcgtttgaattgtcttagagcttcaacattcaatttcgagcgtctcgatatgttacgggactcaatgagacatccgagtaaaaagttattgtcgtttgaattggctcagagcnttaacacccaatttcgagcgtctcgtatatgacgggactnaatcagacatccgagtaaaaagttattgtcgtttgaattggctcagagcttcaacattcaatttcgagcgtctcgatatattactggactcaatcagacatccgagaaaaaag

SEQ ID NO: 19173 - DNA, 412 bp, Glycine max
  unsure at all n locations
ntagattcctttaaagtttttaaggttgaagttgagaaacaatgtggaaaacaaattaagatcgtgagatcagatagaggtgggagtactatggtagatacacagaagatggacaagcaccaggttcatttgcgaaatttcttcaagaacatgagattgttgcccaatacactatgcctgattctccggatcaaaatggtgtggcagaacgaagaaatcgaaccttattagacatggtgagaagcatgaggagtaatgtaaagctttctcccctttgtggattgatcgcttaagacggatgcgtatatattaaactgagttccaaccaaggctgtctcacagacaccttttgagttattcaacggttggaaaccatgtttgcgacatatacgcgtatacggatgcccgtctg

SEQ ID NO: 19174 - DNA, 395 bp, Glycine max
  unsure at all n locations
agcttgaagaaaaaaggccagtaagtaatgtataaattaacatagtgtgaaagatgagaaaaattaatcttaaccattaattaatcaacccctatattataaatgactaccattatttggtacgaattgagacgaaaaagaattacaaatcatgtcaaatcatttatttaatctatactatcatttatgtctatttctaaattgaattatcaataaataattntattctattagtacatgtgccatttattctaaaattaaaattaataaataatttgtaacactaaatttatcatagtaaataatatacaccaattatcaaacgtgtaagtgttacctaagaagtccctttctccatccataagaataaagtaaaggcctatcggacatataaa

SEQ ID NO: 19175 - DNA, 416 bp, Glycine max
  unsure at all n locations
tcaagaaaaagatggcctcagcaaattccttatttccataaggaaattctatcaacagacctccaatctttaatggagagggttaccactactggaaaacccgaatgcaaatttttatcgaggcaatagatctaaatatctgggaagccatagaaatagggccttatatacccaccacagtagaaagagtttcaatagatggtagttcatcaagtgaaagcataaccatagaaaaacctagagatagatggtctgaagaggatagaaaacgagtacacacaacctaaaagccaacacataataacatctgncctaggaatggatgaatatttcagagtttcaaattgcaagagtgctaaggaaatgtgggacactcttcgattaacacatgaaggaactacagatgttaaaagatc

SEQ ID NO: 19176 - DNA, 392 bp, Glycine max
agcttaactatttatggattttcccacccatccattctatagtccatttcaccattagcctccaccaacaacctccaacactaggttgaagaccttcttagcacccccaacttacgtgcctactcacatgcaacaccattcattaatgcatgtatgctatgatcattcaaataaaaatcattgtatcacactattaacatattcattcaccatcatcaatataattcatttcatcaacagctcaatccattatatattaattcaattcatcatacatatcgccattcaacatacaatttagcattcatatgttgttcaattccacatcaattcatcattcatatcattctcaccatccatgaactctcaaatagttcatctacacctcatga

SEQ ID NO: 19177 - DNA, 404 bp, Glycine max
  unsure at all n locations
tcaagaataatggacttagcacacttcttatttctataaggaaattcaatcaatagacctccaatctttaatggagagggttaccactactggaaaacccgaatgcaaatttttattgaggcaatacacttaaatatttggcaagtcataaaaatagggccttatatacccaccacagttgaaagaaccacaatatatggaagcacaacaagtggaagcacaacaatagaaaaacctacagatagatggtctgaagaggataaaagacgagccactataatttaaaagccaaaacataattacatttgacctgngaatggatgaatatttcaaggtttcaaattataagagtgctaaggaaacgtgggacactctacatgtaacacatgaaggcacaacagatg

SEQ ID NO: 19178 - DNA, 378 bp, Glycine max
tagcttatgctgcaaatattcacaatagacctgctcaacctcagcagcaaaatcaatcacagcagaacaattatgacctctccagcaacagatacaatcccggatggaggaatcaccctaatatcagatggtctagccctcaacaacaacaacagcagcctacaccttccttccaaaatgttactggctcaagcagaccatacattcctccaccaatccaacaacagcaacagccccagaaacaacaaacagttgaggctcctccgcaacctttccccaccaactttcacgcacatgattatgcaaaacatgcaggttctacaagagagcacaggctccattcagagcttaactaatcagacgggacaattggctaca

SEQ ID NO: 19179 - DNA, 420 bp, Glycine max
tcaatggagctacatcggtattgtagggcacctagactagtttttgtactagaggtagttttgtaatttcacatgcattaagtgaatatttgatgtgtgtgttcgaaaataaatttaattgaattgggagaagcccaatccaattaaattttagagggggaggtgagcatttgcttgctacaccctattgccacatcatattgtcacactttgtgcatgtccttcatgctttacatgcctcatgacccctaagtacacttactggagaatctcgcacttgatcttggacagtgggctgaaccatagctaaaattctctaatcataattaatgaaaatgtggctccacatattcacacccaaattcaagtgaaatctgaatagaaattcaaatctacctcccattttgtgagacacttacg

SEQ ID NO: 19180 - DNA, 374 bp, Glycine max
agcttgttgtccgtgtacacggttccggtaatggtggcattgacggcaccggtggtcatgctcacttggctgccaccataagtggtgacattaagttgcagccttttagagtcatcaccggcttgggtctgaacggggttggtgagagtgtcgaagttggagattgagaggaaggaagaaagagtgtgaaattgtaaaagttcaaccttttgcctgtcgttgagtgagttgaggaatcctgcttttagctttgagaaggcagaatcaggtggcacaaaatggtcatcccccagaacctgacgtgaggagttgagagttgagttggttgatcaactgggtcgtcttcagaagccgaatcagaacagaaaatctct

SEQ ID NO: 19181 - DNA, 417 bp, Glycine max
  unsure at all n locations
tagctntattccttacaaccactaccatccaaatgggtggaaataagaaatgttgggcttacgtcctttccacaattcataagaattccttttaagattggcctaatataaattttattttgtaaataatagacaatgtttattggttcagcccataagtgtttaagggttgagtgatcactaagcatggtcctagccatttcctgaagaaatatacttttcatttacctctaaacatattctaatttggtgttcttggagtggaaaattgtggtcataccattctcttcacgaatatttcaaaatatcattttcaaattctcccccatgattacttctaattgaagagatacatgataatgactattgaattactccaaaacaaataaaactaggaaattntgcaatacaggatta

SEQ ID NO: 19182 - DNA, 411 bp, Glycine max
  unsure at all n locations
tagctttattccttacaaccactaccatccaaatgggtggaaataagaaatgttgggcttacgtcctttccacaattcataagaattccttttaagattggcctaatataaattttattttgtaaataatagacaatgtttattggttcagcccataagtgtttaagggttgagtgatcactaagcatggtcctagccatttcctgaagaaatatacttttcatttacctctaaacatattctaatttggtgttcttggagtggaaaattgtggcaataccattctcttcacaaatatttcanaatatcattttcaaattctcccccatgattacttctaattgaagagatacatgataatgactattgaattactccaaaacaaataaaactaggaaattttgcaataca

SEQ ID NO: 19183 - DNA, 374 bp, Glycine max
tagcttcaacattcaattttgagcgtctcgatatataacgagactcaatcagacatccgagtaaaaagttattgtcgttttaattggctcagaggttcaacattaaatttcgagcgtctcgctatattacgggactcaatcagacatccgagtaaaaagttattgtcaggtgaattggctcagagcttcaacattcaattttgagcgtctcgatatatgacgagactcaatcagacatccgagtaaaaagttattgtccgtcgcattggctcagaggtctaccttcaatttcagcgtctcgatatgttacgagactcaatcagacatcctagtaagaagctattgctcgttgaatttgctcagagattcaacat

SEQ ID NO: 19184 - DNA, 413 bp, Glycine max
  unsure at all n locations
tatgctgcacacatctacaacagacctcctcaacctcttcagcaaaaacaaccacaacagaacaattatgacctctccagcaacaggtacaatcccgggtggaggaatcatcccaaccttagatggtcgaatccttcacgacagtagcaacaacaaccttattttcaaaatgttgctggcccaagcagaccatacgtncctccaccaatccagctgcaacaacagcaacagccccagaaacagcaaacagttgaggccccttcgcaaccctcactcgaagaacttccaggcaaatgactatgcaaaacatgcagtttcaacaagagaccagagcctccattcagagcttaaccaatcagatgggacaattggctacacagttacatcaacaacagtcctacaattctgacaga

SEQ ID NO: 19185 - DNA, 381 bp, Glycine max
agcttagtgttgcaataatttaatataatttactttattttacttagtatttcttaactaaactaattaatgtatcgaatcatctaatttattaatgttttatttttgtaatatgtgaagtataaataaaacataacagacaaggaagaacatttttcacgaaagaatgaaaagaaacacttatgtcatgggatgatcaacttaattaccttaaattatgttaatatttgaataacttacgaaaaatttatgaattattataattttactacctcaaatttattttgtaataaatttaatatgaatttaatttgtctttcttatcataaggttctgacatgtttgtttgacttacagggtccttcaactaaaggtgagttt

SEQ ID NO: 19186 - DNA, 287 bp, Glycine max
ttagagctcgaatatgccctataatgagtctgattacaattcgatgtgcgacagacttcgacgtagggattgataataccctggagctgcccatcttagtaggcttgaaagagatcgctgttagcacagctgacgtgatagcgaatacgctagcacggatcagacttgctatttgatgtgcaagctgtattgcgaatggctcctgaagcggaatttaatccttacgtatatgtcccgccaatcacaccgccatggtgcattctctatataacttgcactgatgctgc

SEQ ID NO: 19187 - DNA, 408 bp, Glycine max
  unsure at all n locations
tgaagganaacttgatgccttggtcaacctagtaactcagcttgccatgaatcagaaatctacacatgttgcaagagtttgtgttttatgttcttctacagatcaccatacagatctttgtccttctttgcagcaatttggagtcaatgagcaacctgaagcttatgttgcaaacatttataatagactccctcagcagcaaaaccagcaacaacagaataattatgacctttcaagcaatacatacaatccaggttggaggaatcatccaaatcaagatggacaagtcctcacgacaacaacagtctgtcccttctttntagaatgctgctggtccaagcaagccatatgttcctcctccaatgcagcaacagcagcagcagtcacaacaaagccaacaagcaacta

SEQ ID NO: 19188 - DNA, 235 bp, Glycine max
agcttccattgttcaatttcgagtgtctcgctatattatgcgcctgaatcggacctccgaatgacaatgtatgaccatctgaacttctcgagagctaccatcgatcaatttcgcgcgtctagaaatattatgcgcctgaatcggacctccgagtgaaaagatatgaccatgggaatctctcgagagcttccgatgttcaatctcgaacggctagatctatcatgcgagagtatgc

SEQ ID NO: 19189 - DNA, 418 bp, Glycine max
tgtgcattcaatatcctaatcaggctttttcatatgttctcaagactggactaatacatttgctgcccaagtttcatggtcttgcaggtgaagatcctcataagcatattaacgagttccatattatttgttccaccatgaagcccttgatgtgcaagaagatcatatctttctaaaggctattcctcattctttggagggagtggcaaaagactggctatactaccatgctcccaggtccattttcagctacggtgaccttaagagggtcgccttgcagaaattctcgagacaaatgaccatacagaatatgcaatttcagcaagagacaagagtctccattcagagtctgacaaatcagatggggcagatggctactcagttgaaccaagctcagtcccataattctgacaaattg

SEQ ID NO: 19190 - DNA, 425 bp, Glycine max
tattaggaactataaaactcagcttcacaaatagctgatagaatcaattcacagctgaacaactcaaaccaaggcctaaccgtgtttgcacccactgataatgcattctcaagcctcaaagcaggaacattaaactccataaactcacaagaccaaatgcagctgatacaattccacattctccccactctctacaccatctcacagttccaaaccgcaagtaaccccttgcacacgcaagctggaaacagtgatgatggagagtatcctttaaatgtgaccacctgacgcgaaccaagtgaatgtcgaactgaggtggttgatacaacagtgtccaatactatctacagtgatactcatctctcagtgtatcaagtggataaggtgcttctttctatgaagcttttcggcgcgacggcaccggc

SEQ ID NO: 19191 - DNA, 401 bp, Glycine max
  unsure at all n locations
agcttctctgaagttaaaccacacacatatatatatcaagacatgggacaaaatagttcttacaaaaatgttttccccagaacaagtacacgtaaattataacaaatgaacaaacaaaaaagcatactttcattttctcctatcaaatttatcctgagaaaacaaacaaaagtgagtcacttacagggaacaaattcttccagaactgaagatcagtcttaggaggctcaactatcttggtggcccaacagaacaacattatgagagagccacatgcaagggagagagttgaggtaagccaagggtatgggaatgcattcagcaccttcttgttataaatgttgaacaccacattcagtgcccaccatgttgcanagtatatcccaatcttcaccttctta

SEQ ID NO: 19192 - DNA, 465 bp, Glycine max
  unsure at all n locations
aattgtgattctgcattttttttcctaagtatctagattaccagtgtttctccatcgattaagattaatcttattagtaatatataactattattaattcaaaaaaaaattacacataaagaaaatcaaacttaaattgtttgttaaataaataattctcctacatataaatacaatttacaccactatatcaatcctataaactaattttgaatttgaatttgaatttacacaataaagtttgttcaattgttgtaagataatatcttattatatttttttagattagtataaaattgattaaataatatcctattatattagtcataataggacaattcttaaattgattaattagttaatctgatttagaatagctcaattgcattcggtgaaacatacttgtgatgcagaaagaacaggttcaagtttcaagtatctaagacatggntgtatataacctat

SEQ ID NO: 19193 - DNA, 533 bp, Glycine max
  unsure at all n locations
cgctccaaaacgtcttcgttcggctccgctctgttttccttcaccgagtcggacgaaggagacggagttggcggcggcggcggcggtgatggatgggacaacggtgacggcggagggtcggggttttgggattcgaataatgggaatgatagcacggacttgtattaccggacgatgattgaagcgaatccagggaaccctctgtttcttggcaactacgcgaggtacttgaaagaggtacgtgaattgaagctatttagttattacttttagattaaagcgtgtagatggatgaggtgatagagttgtttatttgatggcaggttcgaggggactatgtgaaagcggaggagtattgtgggagagcgattttggcgaatccgaatgatgggaaggtgctatcgatgtatgcagatttgatatgggagagccagaaagatgcttcgcgtgctgagacttattttgatcaagcggntannagcagctccgatgactggtaactaacatcaaactcttgggtggttctctttatg

SEQ ID NO: 19194 - DNA, 463 bp, Glycine max
  unsure at all n locations
caatgagctggtgaagaagaatgtggcatttacctgcgtgaaaaacaagagcaagcgttagttttgctcaaagaaaagcttactaaggcacctgttctagctcttcctgacttttctaaaacttttgagctagaatgtgatgcctctagagtgggagttggagctgtattgttacaaggtgggcaccctattgcttattttagtgaaaaacttcatagtgccaccctcaactaccccacctatgataaagatctttatgccttaataagagccctccaaacttgggaacattaccttgtttccaaggaatttgtcattcatagtgatcatcaatcacttaagtacattagagggcanagcaagttaaacaagaggcatgcaaaatgggtagagtacctacaccaatctccataggttatcacatacaaaaagggacaacaaatgtggtagctgatgcgtctct

SEQ ID NO: 19195 - DNA, 500 bp, Glycine max
gacattcatggtgctccgaacaaaggtggagtatggaggattgccttgagggtccgcacttaggcaatcatgaaactcagctccaaactcaaaagtggaggacacatgaacaaccctaagcaataacattcatgtgtctccggaaaaggacgagaatggaggattgccttgagggtcctctcttaagcaatcatggaatacagctccaaactcgaaaatggaggacacgtgaatgacaatgcaattcactcacgtggctccagaaaaggatgagaatggaggattgccttgagggtcctctcttaagcaatcatggaacacaactccagactcaaaagtggagaacacatgaacagccctaagcaataacattcatgtggctccagaaaaggatgagaatggaggattgccttgagggtcctctcttaagcaatcatggaacacagctccagactcaaaagtggagaacacatgaacagccctaagcaataacattcatg

SEQ ID NO: 19196 - DNA, 400 bp, Glycine max
tttgcttgcttatttagtagacccttgaagataaaaccattacattttggttcagaacagcatgtgcaaaaatgtaactgatgaataaaacagagaatgtatgccaatgatataagcaatagtttaaatggtatttaatctgatgtgaaagccatacaaacaaaccttaacagcaccatcatagtctgtggaggcaagatagttctggatgtagttattccaacaaacacaactgagccttgatctgtttgacatctcaactacaggataatggatgtcaatggaatcattgaaaagtgcattgaactcaaatattttaattttctttgatatcccagcagcagcaaagtaatcttcatccctatcaaaactcagagagcatattacatttgcaggatta

SEQ ID NO: 19197 - DNA, 526 bp, Glycine max
  unsure at all n locations
ggcactatcacgacctgaaagaaagacccttcttcgatgggctgtgtgattntctaagctctggccctgttattgcaatggttagaaaatataaatgactcaaccactgacttaagaatccaacaagccagtgtccctaatctgtctttttttcttgtttccaaaaattgatatcatacgtgtgggaaggacaaggagttatttcctatggccgaaagctaattggagccacagatccacagaaatcagaacctgcaaccattangggtgatcttgctgttgctgttggaaggtaactaatagcatgtttggttacaagatgtggtttttacgtgtactgagatgtttatagttataattntcacatccaaaatgtaatttcttacttcttaacnntgttcaaacatcngtataattgttaaccanagaaaagtgctagtttcgtttctctttacataatgaattgtccatttattggtgatcacaatttgataattgttgtcatgcatgcagaaacatcatccat

SEQ ID NO: 19198 - DNA, 465 bp, Glycine max
  unsure at all n locations
ctctaagggctaccgtgtctacaacttgcaaactaagaaactcgtcattagtcgagatgttgaagttgatgagtacgcttcttggaattgggatgaagaaaaagtggagaagaacgttcttatacccgctcaactacctcaagaaaaagctgaggaagaagacccaggtgaaccaccttcacctccaccacaacaacaagatcaagaactatcatcaccagagtctactccaagacgagtaagatctttggtggacatatatgaaacctgtaacttggccatacttaaacctggaagctntgaagaagcgttaaagcaggaagtatgggtcaaggcaatggaagaagagatacagatgatcgagaaaaacaacacatgggagttagtaaatcgtccccatcaaaaagatatcattgggggtaagtgggtctataagacanagctcaaccctgatggcaccataca

SEQ ID NO: 19199 - DNA, 501 bp, Glycine max
cagacccttattccatttttttaaccaagccacaactaagtctctcgttacccattatctttggctttggttgttacttcttcctcacttcctctctgcacattttttgtttctaatccttctatttaggtatgtttttatggcatttaaatacttagtatttcttttattatttgattagtatgactgaacatgatgattatatttatttgctattggttgtttacggttatgagttttaaactcaattattttgatgatatatgactagtggtatgtacttttatttggttattatgaatgactttctggattatatgacattctatgaagtattatatttttagtgtgatgaatggctatgatatcttgtttgattggtttctattctcatgtattctggctatattattatgcgatttgaacaatctaactatttcttatttgcatggtatggttgaacaagtatgctatttcgctatgtggatttatagctaatct

SEQ ID NO: 19200 - DNA, 449 bp, Glycine max
  unsure at all n locations
tggcccatcccaaaaagtgtgggagatattaggagcttccatgggttagcaagcttctatagaaggtttgttcctaatttctctacaattgcctcacctctcaatgagctggtaaagaagcatgtggcatttacctgnggtgaaaaacaagagcaatcctttgctttgctcaaagaaaagctaactaaggcacctgttctagctcttcctgacttttctaaaactttttagctagaatgtgatgcctccagagtgggagttggagctgttttgttacaaggtgggcactctattgcttattttagtgaaaaacttcatggtgccacccttaactacccctcctatgataaagagttntatgccttaataagagcactctgaacttgggaacattaccttgtatcctangagattttcattcatagtgatcatcaatcacttaagttcat

SEQ ID NO: 19201 - DNA, 466 bp, Glycine max
  unsure at all n locations
agactggaaagcggtttctaatgactcctctgcggcttccacataaggcatagaggatgggcagctcaccaagatgtcttcctcgcttgatacgatgaccagatgcccttccactacgaatttcaacttttggtggagtgttgagggaacaacccccactgagtggatccacgggcgccccaatagacagctgtagggggggttaatatccattatttggaaggtgacttgacaggtgtgagggcctatctgtactgggagatcgatctctcccctaacctctcggcgggtgccgtcgaaggcacgaaccaccattgaacttggctttaagtgggaggcattgaatggtaatttctccaaagtgatcttaggcatcacgtttaaactggaaccattatcgatgagcactttggctacgatatggtccatacacttgactgatacgtgcanagccttattatgccct

SEQ ID NO: 19202 - DNA, 501 bp, Glycine max
  unsure at all n locations
ttgatggggcctatgcaggttgaaagccttggaggaaagaggtatgcctatgttgttgtggatgatttctccagatttacctgngtcaactttatcagagagaaatcacaaacctttgaagtattcaaggagttgagtctaagacttcaaagagaaaaggactgtgtcatcaagagaatcaggagtgaccatggcagagagtttgaaaacagcaggttcactgaattctgcacatctgaaggcatcactcatgagttctctgcagccattacaccacaacagaatggcatagttgaaaggaaaaacaggactttgcaagaggctgctagggtcatgcttcatgccaaagaacttccctataatctctgggctgaagccatgaacacagcatgctacatccacaacagagtcacacttagaagaggcacttcaaccacactgtatgaaatctggaagggangaagccactgtcagcacttcacatctttgaagtcatgtaca

SEQ ID NO: 19203 - DNA, 397 bp, Glycine max
ttgcttatcctatgcttctttggccgtcgttgcattagatatcttctcaaatgtatcttcatccaccgattgataaatgagaaagagagctttcttgtctctctttcttgactccttcaacgtctcctttacaccttgacttagcgaggcttcatcttgctcctcgaagccattctctacgatatcccacacatcttgagctcctagtagcgccttcatcttgttactccaattatcatagttgttctttgtgagcatcggcatttggaaaggaaaacctccattcgccatcttttgaggatcttgaagctctgataccaatttgttggaaataaggctttttatgtttaggaaaagtgtttaagaatattggagactctgaatagaaacttgatag

SEQ ID NO: 19204 - DNA, 422 bp, Glycine max
  unsure at all n locations
aaatctgcacctgtcgcaagactctatggtttatgctcctctgacgaccactatatagacctttgcccttctgtgcagcaatcttgagcaattgaacagccttaagcttatgttgcaaacatctacaatagacctcctcaaccttagcagcaaaatcaaccacagcagaacaattatgacctctccagcaacagatacaatcccggatggaggaatcaccctaatctcaaatggtctagccctcaacaacaacaacagcagcctgctccttccttccaaaatgctgctggtccaagtagaccatacatttctcctccagtgcaacaacaacaacaacatcaacagagacaacaatccactactganggccctcctcaaccttcatgggaagaattagtgaggcacatgacaatatagaacat

SEQ ID NO: 19205 - DNA, 541 bp, Glycine max
  unsure at all n locations
cctctcataactaagctcacctccttgagaagcttccttaagaagattcctaaagaagctagagcttagctacacgtacctctctaatagctaagctcacctccttgagatgagaagctagaacttagctacacaccccctataatagctaagctcacccccatgacaaaaaaacatgaaaatacaaaaaaaagtccttactacaaagactactcaaaatgccccgaaatacaaggctaaaaccctatactactagatggccaaaatacaaggcccaaacgaaggaaaaacctattctaatatttacaaagataagcgggcttatacttggcccatgggctcgaaatctaccctaaggctcatgagaaccctagggccttcccttggatctctagcccaatctacttggagtcttctacccaatgcccttgcgggataggattgcatcataacgtatctaccatanatgcgatcatcntccttttcatcatgggcggtacgacttgggctgcgagaatctctcatcttnttgcatattcct

SEQ ID NO: 19206 - DNA, 326 bp, Glycine max
cgagagctaccattgttcattttcaagggtctctatttataatgcccctgagtctgacctccgcgggaaaaggtgtgaccattggactttctagagagctacgttggttaattttcaagcgtcgctatatataatgcccctgagtctgacctccgaggtaaaaggtatgaccattggaattgctcaagagctaccgtggttcattttcaagcatcgctatatataatgcgcttgagtctgacttccgagtgaaaggttataaccatgcgaattgctcaagagctcgctttgtacagttccgagcgtgttgttatattatgcgcctg

SEQ ID NO: 19207 - DNA, 407 bp, Glycine max
  unsure at all n locations
ttgtttatcttttccttcaacatacattgttgtaactttattggttgtataaggaagtgtcaacatgagaaaatggtcatatttgcttagccaatcaaccaccaccatgatagcatttttcccttgtgatgttggcaacccctcactaaagtcaatggtaacatcctcccacccttgatctggaattgcaagaggttgtatcaaaccaactggcttctgggtttcatatttatttacttangaaggcaattgaatgtttatcttgngagagcaccgcacctatcacaatatcacttgcatctgtttttacagtgaatggtcaagaaaatttgacatgacaaatgttggtgtagacatcatagttgtctttaactcttcaaaagccttggaagatgactctatccaag

SEQ ID NO: 19208 - DNA, 399 bp, Glycine max
ctttccattcaccacatacacactcccaatttgacttttaaagagaataacaagactatatttatactgtcagcttcatacagaataaatatgaacataaatctgttagatagaaataaatgtgaaatatatatctttttttaaaaaaagaactaaccatcgcaatagtgtcttctacatcatccttgtttctgcctgccagacgcctttttaaggattcaagtgcatctctaagcttcttcaaaagaacatgtttttccaatgatgctgcctctctaagtctagcctaaacttcaccagcatacaaaaagctagttaaaacaggaacatcaatctattagtaaactatgaatataatcattggttatttcagttgcaaaccatttacaataagaatct

SEQ ID NO: 19209 - DNA, 501 bp, Glycine max
  unsure at all n locations
aaacatggtaccagcttgagagttaatcaaaaaattaatgatgcatctttgtttccgatcagtccatgcatcggacataatagtacaaccatacttgacccattgctccctatggcctttcatcaaattttcagtatattcaacttccttcttcaagagtggaactctgatgtcatgatagctaggaatgggcaaatgtggcccatattgaccaatggctgcaaccatgttctcaaagcttttcaatttaatgaggttgaatgacaaacctgcttggtaccaaaagcgagcaatatgttgatgcaccttcaatacttcattcttatccattgactctcttatgttcatttgcctcagcatctccatttttctccgatngattgcattntctggattcttacagaatntgtccattggtccttttttagtcccacactttgtctttgcacttgcagcagcattacaagagtccgcanactcatcttcttcacttccatcaca

SEQ ID NO: 19210 - DNA, 402 bp, Glycine max
agctttctattttcagtagatgaagatgaatctgtggccacctcatggactcctctaaggacaatagcataatttcttgcactgaattgtgagttggaaaccatcttctcaatcaaattcctagcctcagcaagggtcatatcaccaagagctccaccattggcaacatcaatcatactcctctccatgttgctaagtcccttatagaaatattgaagaaggagttgctcaaaaatctagtggtgaggaaagcttgcacataatttcttgaatctttcccagtactcatacaagttttctccactaagttgcctgatgcctgaaatgtcttttctgatggcagtggtcctagatgtagggaagaatttctccaagaacaccctcttaaggtcatcccagcta

SEQ ID NO: 19211 - DNA, 443 bp, Glycine max
acaacagatcttaattaggaccatttcgatgaaattgactcattacaactatgactttaacaatgatgattataaaaggtgcatgcatgttatgttgcatgtgaatctagtttaagaccatgcaataatgcaaacaagtatacatttcaactaaaatgctaccatgaaatgtttataagccaattaagaaaatgcaagctcaccaattgcatcaacagtggtttttccattggaaaaccttccagaaggtccaccagggaagtcaatcccataaggcaagtaatcagccctagccaaagattggagctggttgttgttcccattatcaaccaaagaatcaccaaaaatgaagtagcatggaacttgtggcgcaccttgaacaccaccccacaagccaagagaaacaacaacaactatgagtgccaacatgcttattgtgagat

SEQ ID NO: 19212 - DNA, 443 bp, Glycine max
gagaagctagagcttagctacacacacccctctcataactaagctcacctccttgagaagcttccttaagaagattcgtaaagaagctagagcttagctacacatacctctctaatagctaagctcacctccttgagatgagaagctagagcttagctacacaccccctataatagctaagctcacccccatgacaaaaaacatgaaaataaaaaaaagtccttattacaaagacaactcaaaatgccccgaaatacaaggctaaaaccctatactactagaatggccaaaatacaaggcctagatgaaggaaaaacctattctaatatttacaaagataagcgggctcatacttagcccatgggctcgaaatctaccctaaggctcatgagaaccctagggcctttccttggatctctagcccaatctacttggagtcttct

SEQ ID NO: 19213 - DNA, 527 bp, Glycine max
  unsure at all n locations
aataaagcaagttattgacacagcttctccccaaaaatacttaggcaatttcctgccttttaacatgcttctcaccatgttcatgatagttctgttccttctttcagccaccccattgtgttggggtgtataaggagtaggtacttcatgaagcatcccttcatcacaattatttttgaaagtcatgtgaagtatattcagctccacatctgtccttatcaccttaattacctttccactttgtttttcacacatcaatttagacttcttaaaaacaaacaacacttcactctttctttntaatagataaatctacatcatccttgtatgttcatcaatgaaggatacgaagtacctgttacctccaagagactggatctcanagggtccacacacatcttatttgatagtgagagtgagagagacattntagagagaanaactgatatcatttcattctaaaaagttagttacaaagaggtatatatagacctctaaacctctgaactaagcanacagaaacaacc

SEQ ID NO: 19214 - DNA, 497 bp, Glycine max
  unsure at all n locations
acggcccaataagcacggtgctcaatctccactggaaggtggcatgccttaccaaaaaccatcctataaggagaaatcctcaaaggtgtttggtaagcggtcctgtgagcccatagagcatcttcaagtagctttctctaatcctttatgttgggttgcactaccttttgcaacacttgcttgatctctctttgtgctgctggggcatctcatgcctatatgcaatagtccctttcgctctctaaaattgctcacaagtggtagaaaaatgatgagcatctctaaaaatggtgggccaatagaacccacaatccaataccttcttagtggtctactgaggaccaaaatgactgcgggtaggtgtgccatgacaaaactganaaatagattgaatctcatgatttggcacacatctgcggatcacttggtcactaccaaaccttgaaaaataaggatcatcccacacataatctttagcatcactcttaagnttatct

SEQ ID NO: 19215 - DNA, 334 bp, Glycine max
aatcatccaaatatcgagaaggacaagtcctccataacaataacagcatgtccctcccttgcacaatgctgctggtcctagcaagccatatgttcctgctccaatgcatcaccgactgagacaacacgctgctgaagcccctccttaaccttacttagaagagtcagtgaggcaaatgttcatccagaatatgagatctcaacagcagacaagagcctgcattcagagtctgacaaatcagatggcgcagatggctactcactcaaaccaagctgagtcccaaaattctgacaaactgccttcacaaactatgcagaatctgaagaatgtgagt

SEQ ID NO: 19216 - DNA, 406 bp, Glycine max
agctttggttttgttgactcgctccaatggctcatcatgtcttctattgaacctttcttcatacgctcgaagagaacccatcaattggtctacggtcattgagtctaaatccttagactcttcaatagcacaaaccacataatcaaatttagcgattaaggagcgaaggatcttttccaccacacgaacatcttccatattttctccataacgcttcatttggttcacaatagccaacaccttgttgccaaaatctgagatagattcagattccttcatatgcaatgattcaaactctctacgtagagtttgtacgcgcaccttttttaccttatcaacaccttcaagggaggttttcacaatctcccatgcttctttggatgtggttgcatttgacaccaactcc

SEQ ID NO: 19217 - DNA, 405 bp, Glycine max
  unsure at all n locations
agcttgttatttagttnttgatgcagcaagtgagggaaaacaattcttaattgttggtacaaaaaaaaaagcagcggattcagtagcacgggcttgaataagagctcggtgtcattatgttaataaaaagtggctcggcggtatgttaacgaattggtatactacagaaacacgacttcaaaagttcagggacttgagaatgcaacaaaagacggngagactcaatagttttccaaaaagagatgccgctatattgaagagacatttagctcatttggaaacatatcttggcggcattaaatatatgacggngttacctgatattgtaataatcgtcgatcaacaagaagaatatacggctcttcgagaatgtataactntggaaattccaacaatttgtttaat

SEQ ID NO: 19218 - DNA, 475 bp, Glycine max
  unsure at all n locations
gatggatcttatatatctatatatctatagatagatatatagatatagatatatagatatagatcatacaatgaagtaccgcacgagtgggtatataggaatccaaatctgccgaatcactcatgttatgatcttctacatcctaggtcttcccgttccttcatctggcttatgttcttcatgtagcattcagactgaatgactctatgaaattacgtcgctacttccacatggtacgggtaacgtaggagacatctctatttttcccggggggaatccttagaattaccacagcttagctntcaattcgcctctgaccatcaaatgaaatgtgaataacccgtcctcccctctntgaaactntgaaacaaagggtgcttccggttctgtcggtgcttgaaacaattntagtcttctcatattactatatctcgagagtcacataatttatatgaggaactactgaactcaatca

SEQ ID NO: 19219 - DNA, 525 bp, Glycine max
  unsure at all n locations
gatgatcgtgcaaaatggatagaattaaatgatttaataaaagttggtgcagtgggaagcaaaattttagtgacaacacggagtgactcaattgcttcaatggtgggcactgtaccctcttatgttttagaaggtctgtctgtggagaattgtttgtctctgtttgttaaatgggcattcaaggaaggtgaagaaaaaaaatacccaaatctagtggatataggaaaagaaatggtgaaaaaatgccaaggggttccactagctgttcgaactttaggaagttctctgttcttgaattttgatttagaaagatgggaatttgtaagagaccatgagatctggaacttaaaccaaaagaaagatgacattntacctgcccttaagttgagctatgatcaaatgccatcttatttgangcagtgttctgcttatttttccctctttttccaaggatttggccacattggttctcantttgtgagtctttgcngatcatttggattacttcgatcntcctctggaagt

SEQ ID NO: 19220 - DNA, 510 bp, Glycine max
  unsure at all n locations
gaaacttctcagctgcttgatattgagtggtgtaggccactctagaactgtctgcaccttagtagcatccatagcaactccttcacctgaaactatatgtcctaagtactctatctccaatacaccaaaagagcatttagacaacttagtaaacaaaacattttctttcaacactttcaatacagcctcaagatggcataagtgttcatgccatgtggaactatataccaatatatcatcaaaaaacactaacacatatttccttaaagcatgttggaaaatatggttcatcaaacactgaaaagaagtcggagcattggttaaaccaaatggcattaccaaccactcataatggccatggtgagttcaaaaggctggtttatgtctatcctcacgttggactagtatctggtgatagcccgaccttatatccagtntagaacaatactttgcaccaaatagttcatctaacagcttggtcatagtaggcacagggaaactatcttttac

SEQ ID NO: 19221 - DNA, 404 bp, Glycine max
ttgctcaacattcaatgtcaagcgtctcgatatattatgggactcaatcagacatccgagtaaaaagttattgtcgtttgaattggctcggagcttcaacattcaatttcgagggtctcgatatattaccggactcaatccgacatccgagaaaaaaattattgtcgtttgaattggctcacaggttcaacattcaattttgagcgtctcgatatgttacgggactcaatcagacatcccagtaaaaagctattgtcatttgaatttgctcacagattcaacattcaatttcgagggtctcgatatattacgggactcaatcagacattcgagtaaatagttattgtcgtttgaattggctcacaggttcaacattcaatttcgagcgtctcgttatattaccg

SEQ ID NO: 19222 - DNA, 464 bp, Glycine max
  unsure at all n locations
gattgagtcccgtaacatatcgagacgctcgaaattgaatgttgaagctctcagccaattcaaacgacaataactttttactcggatgtctgattgagcctcgtaatataacgagacgctcgaaattgaatgttgaagctctgagccaattcaaacgacaacaactttttactgggatgtctgattgagtctcgtaatatatcgagaggctcaaaattgaatgttgaagctctgagacaattcaaacgacaatagctttttactcggatgtctgattgagtctcgtaacatatcgagacgctcgaaattgaatgttgaagctctgagccaattcaaacgacaataactntttactcggatgtctgattgagtcccgtaacatatcgagacgctcgaaattgaatgttgaagctctcagccaattcanacgacaataactntntactcggatgtctgattgagtc

SEQ ID NO: 19223 - DNA, 398 bp, Glycine max
  unsure at all n locations
ttgttagcttatattattctatgaaaagaatggtatcttccacaacttctcatcactgagaacacctacacanaatggngtagttgaaaggaaaaatagaactttgcaagaaatggtaggaccatgctttgcacaatctcactaactaaaaacttttgggcagcaacaataaacacaacttgctatgttcaaaatagaatatggtaagacattgattaaaaagactccttatgaactgtggatggaagatgacctaacatttcatactttcatccatttggatgtaagtgttttatccttaatccaagaaatgaactcgcaaagtttggtttagaggtggataaaggtatcttcctaggatattctgacatatctaaagctttcagagtggttaactc

SEQ ID NO: 19224 - DNA, 422 bp, Glycine max
  unsure at all n locations
gggcagcaatactactaacttgactgtagtgtgcttgtatgtagatgacttgcttgtgacacgaaataatgagactgagattgccaactntaaaggagagatgataagagagttcgaaatgactgatttggaccttatttcttattttcttggaattgaattcaagagaactaatgggggagtgatcatgaatcaagggaggtatgaaagagatgtactgaagaagttcagaatggttgactgcaattntgcagacacacccactgccactggtgtgaacttggtgaaagatcctaatgaagaagaagtagatgtaacattgtatagacaaatggtgggctcactgaggtatctntgttgtactagacctaacttattgtatgttgntggcttaattagtagatatatggagaatcttgaac

SEQ ID NO: 19225 - DNA, 276 bp, Glycine max
agcttcttgttgtcggtaagatatgccccatagtcaatagtgcatgggttactcccttgcgagtggtatcacagaaatggggtacacagattatcactaatgaccagaatgagttgattcccacaataactatgaccggatgaagaatgcgcattgattatcgtaagctaattaaagctacacaaacatatcattcttctcttactttcatggataaaatgttggaacgccttatgggataagcctattatactttccttgatggttattcccgat

SEQ ID NO: 19226 - DNA, 209 bp, Glycine max
  unsure at all n locations
agcttgtagtcgattacttacatactgtaatcgattaccagaggagtttttcagaaaacattctcaacagtcacatctttctgtgtggttcttgaatggctatcataggcctatatatacgtgacttgagacacgaatntgacaagagttttgaacgaaaaaagtctcatcctcctaaaaagcaaaattgctttatcctcttacaaatt

SEQ ID NO: 19227 - DNA, 431 bp, Glycine max
tatctaacattaaggtttatttaatttgtttgacaatttatgtaataactctatagactatagagtgtttgattaccgaaccttaactactactgaaaattatattacaacaacctaaatttgtaaacattatcttggttattttttatgaggacacatgtattttatacggaagaaaatattgtgagttacataaaaaattattattataagagataaaagtttctctttgaatatttagcatataaatgtacactcaaagctcaaatttggaatcacatatgaatttagactagtcatgagtaaattaatttatacattccatgttaaaacaaattatcatcataatatgaattatttaatttcatattataaatatattaaatactattgcacgacttacccttgaactaatttttacagattaaccg

SEQ ID NO: 19228 - DNA, 415 bp, Glycine max
tatgctgcagacatttattatagttctactcaacagctatgcgcgcaacttcagagtaattatgacctttcaagcaatagatacaatccatgttggaggaatcatccaaatctgagatggacaagtcctgcacaacaacatcagcatgtccctcctttccagaatgttggaggtccaatcaagccatatgttcctcctccaatacagcaacagtgacaacaaagacaacatgcaactgaagctcctacttaacctttcttagaagagttagtgaggaaaatgaccattcaaaatatgcaatttcagcaatagacaacagcctccattcatagcttgacaaatcagatggagcagatggctacttagatgaaccaagctcagtcccaaaattctgacaaattgccttcataaactg

SEQ ID NO: 19229 - DNA, 142 bp, Glycine max
acaagcactgccgcagtggtacaagacagttaatgagtttatgagcgactcacgattcacaagatgtgacatggaccattgctgctatgttaaaaaatatactaatagttatgttatcccttgtgcgtatgctgatgacatg

SEQ ID NO: 19230 - DNA, 440 bp, Glycine max
  unsure at all n locations
cttccgttgttcaatttctagcgtctcgatatattattttttcgaatcttacatccgagtgaaatgttatgaccattcgaatttgtcgagagcttctgttgttgaatttcgagcgtctagatgagttatgtcaccgaatcggacatctgtgtgaagagttatgaccattcgaatttctcgacatcttccgttgttcaatttcaagcgtctcgatatattatgtccccgaatctgtcttctttgtgaaaagtttggaccattcgaatttctggacagcttccgttgttcaatttcnagggtctcgatatattatgtccccgaatcggacatttgtgtgaaaagttatgaccattgaaatttcttgagagcttccgttgttcaatttcaagcgtctcgatatattatgtcccctaatcagacatccgagtgaaatgttatga

SEQ ID NO: 19231 - DNA, 240 bp, Glycine max
  unsure at all n locations
tctgcttaaggtacttgtggctggtgcgaggcattggtggctcggtgcttgctctggctgcaaagaggaaagggtttgaggcggtagctttgagaacgatatgagtgctataagaggggaggggcactatacgggtcccattcacatacaaagcactgcttcggctgatttggaagctatagatttggacgctgctgcaaacctatgacagctggctgtatcacggatgatangatcaat

SEQ ID NO: 19232 - DNA, 246 bp, Glycine max
  unsure at all n locations
agcttatgatattgtcttggaaactataaaaataaattatttgaatcaaagatacattattttcatgcctatcaaatgtgttaaattttaaaattaataaatcattattgatataactttcatgataattattataaaaatcacgaaacttattataaatacataattactataattaaatacaaatataaaatacttcacactatcaatatataatctatttaatcaaatcanaatcaatatata

SEQ ID NO: 19233 - DNA, 433 bp, Glycine max
  unsure at all n locations
tctattctgaatttcaagcgtctcgatatactatggttcacaatcgaacatccgagtaaaaagttattatcgttagaatatgctcagagcttctgttttcagtttcgagcgtctcgatatattacaggactcaatcggacatccgaattaaaaattattgtcgtttgattttgctcatagcgtctgcttttaatttcaggcatgtcgatatactgcaagacacaatcggagatccgagaaaaaatttaatgttgtttgaattttctcaaagcttccattttcaatttcgagtgtctcgatatattacaggacttcatcggacgtccgtgttaaaagttattgtcatttgaatntgctacgagcttctgttttcaatttcgagcgtcttgatatattacgggactcaatcagacatccgagtaaaatgttattg

SEQ ID NO: 19234 - DNA, 249 bp, Glycine max
agctttgagcaaattcaaacgacaataacttattactcggatgtctgattcagtcccgtaatatatcgagacgctcgaaatggaattttgaagctctgagcaaattcaaacgacaatcactttttactcagatgtctgattgagtaccgtaatatgtcgagacgctcaaaattgaatactgaagctctgagcaaattcaaacgacaataacttgtcactcagatgtctgactgagtcccgtaatatatc

SEQ ID NO: 19235 - DNA, 393 bp, Glycine max
  unsure at all n locations
agcttaccattataggaggccatggataagagcttggaggaagaacgagatgaatgaagggagagggagagaatagcacaaaattttgtgctctaaatgagctttgaaatctgaagtttaatattcaaatggtcaaagttaaaaaaaatgcacacacatgacctctatttatagcctaagtgtcacacaaaattggagagaaattcgaatttcaattcaaatttcacttgaatttgaaattgaatttgtggagacaaacttcggagccaaaatttcactaattatgattagtgaattntagttatggttcagcccactaatccaagatcaatctcaagattctccattaagcgtgcttangtgtcatgacgcatgtaaagcatgaacgacatg

SEQ ID NO: 19236 - DNA, 427 bp, Glycine max
tgtcacaagtatatttaacctgaacctcttagaagcttggcaaacataccagccagctgattgctggagttaacaatgttggttgtaatttcgctggaaagcaccttttctctaacaaagtgacagttgatctttctatgcctttgatcttttcatgtgtttgtctcccaattttagttgttggagtagttgcctaagttccataagctcacatgtgactattgccatagaacaaaatccaacttttgcactggatctagtaattatgttttccttattgctcttccatgatattaggtttcctccagcaagaacacagtatccttaagtggatcttgtgtctaagggtgacctttcccagtcaacatcagagtaatgaatgatcttttcattgcctttgtcctcatgtaataatcctttacctagt

SEQ ID NO: 19237 - DNA, 430 bp, Glycine max
  unsure at all n locations
atccaccatcctagcgttacaatatttattaatcatataatngnaagcataagcattaggcacaattccacttggcttcatattctcatacatttaaaacccttccctttgaaggccttgcttgaaaaagccgctcattaacacaccacaactatggtggttggcaaccaaacccaacctatccatcgtgcaaaacaacttctttgccagcctaacatctgcactcttgcaacacccataaatcaacgtagtgtatataacaacattcagagagaaaccaaactcttncaacatggccaaaagccgaaaccctttcatcaagtcaccagcttcacaacgacccttgatcataatcccaaaactgtaggcatccataacaactttacgcttgaattcattatatacccaccaagctatatcgaaacaattt

SEQ ID NO: 19238 - DNA, 425 bp, Glycine max
  unsure at all n locations
atactcacgcttgccttgccccttgatatatttgagggtttcatggtttctatgaatgacatattccttgggataaaggtagtgttgccatgtattcaaagcccgtactaaggcatacaactgcttatcataagttgaatagttaagggtgggaccacttaacttttcactaaaataagcaattggatggccttcttgcatcaacacagccccaatcccaacatttgaagcatcacactcaatttcaaaagatttttgaaagattggcaacgcaagtatgggggcattacttagcttttgcttaagaacattgaaagcttcttattgtttgtctcgccatatgagaccaacattcttgttgagcacttcattgagaggtgcgtgcaatgtgctgaaatccttcaaggatcggctataanaacttg

SEQ ID NO: 19239 - DNA, 312 bp, Glycine max
ctctttatcacgatttgcttacatgcaagctaggaaatcaacaccttcatctactctcttcatcattcctcttcattttatttctgagatacaagctttaggtaagggggctctttcatgtggtcatggcaatagacaatggaatcctcaaatgtcaccttatatatctgcacagtgtaagggcattcatattacaaatcttattacaactgctccggaaaacatggtctgtctggggagctcacccatgtattctgcatatctttctcaatttactgctgaaaatacaatttcatgttgaattggatgaac

SEQ ID NO: 19240 - DNA, 271 bp, Glycine max
  unsure at all n locations
agcttcttcttatagtccacctttgcttgaccttctttatgcttaaaaatagaaacattacgcaaaagatcaagaggagttagtgggttaaaaccataaacaacttcaaaaggagaacaattagtggtgctatgaacaactctattgtaagcaaattcaacatggggtaaacaagctctccaagtttttaagttattcctcanaactgtcctaagcacagttcccaaagtcctattaacaaccttccgttgcccatcggtttgtgggtgac

SEQ ID NO: 19241 - DNA, 427 bp, Glycine max
tgcttctacattctctcttgaagagaaggatattacttttgaagtccatagagaaactcttaatggatttgcaagtgtttgcccaagagtttcttttgagagagcatttggcaatgaatttctctggaatatctctctcatttccttttgagaggataatacattttgaacaagcaaaactctctctttaaaattcgtgcccaagttacctatttgtaggcctttgatggccattcacaaattcaatcaaaagatatgactgttggcagattttctgaaaactctccattggtaatcgattacacagttataatttgaagggttatgaattttgaatttgaatttccaaagttcctttgctggtaatcgattacaaacatatggtaatcaattacatgttcaaaattcaaaattgaaaacccttttc

SEQ ID NO: 19242 - DNA, 251 bp, Glycine max
agcttgtttacaaaaacctatttggtttcgattagcttatgagaagaaagtttagggactaaatcccatacttcattccttttaaactgatttaattcttcatgcaaagccaacaaccaatgctcatcatgtagtgcttcacatcttcatcttccacagcattttcttgaacaagagagttagttccatcacaaacaacatgtacatattcttccacacataatgttcttctattaaacactctatatgcc

SEQ ID NO: 19243 - DNA, 347 bp, Glycine max
agcttaatacccaaaatgacatctataggaccaaggtcctttatatcaaaattactagacaagaaagacttcacatcatttatgaaatgtatattactatcaaatatcattatgtcatctgcatacaaacataaaatgacacatccaatatcatcaaattgtttcacatacacacatttacaactattattgatttgaaaaccatatgaaagaacaacttgatcaaacttttcatgtcattgctttggagcttgtttcacaccacataaaaatttacaaagtttgtaaactctcttttctttacccgattctacaaaaccttacgttagctcatactaaattcttct

SEQ ID NO: 19244 - DNA, 303 bp, Glycine max
  unsure at all n locations
agcttcgcacatgataatggagacacatgaacagcgctaggcaatgacattcatggtgctccgaacaaaggcggagtatggaggattggcttgagggtccacacttaggcaattatgaaactcagctccaaactcgaaagtggaggacacacgaacaaccctaagcaagaacattcatgtggctccgaacaaggacgagaatggaggattgccttgagggtcctctcttatgcaatcatgaaacacagctncatactcaaaagtggaggacacacgaacagccctaagcaagaacattcatgt

SEQ ID NO: 19245 - DNA, 437 bp, Glycine max
tatgctgcaaacatttataatagaccctctcagtagcttaaccaacatcagtagaataattatgatctttcaagcaacagatacaatccaggttggaggaatcatccaaatctgagatggacaagtcctccataacaataacagcatgtccctcccttccagaatgctgctggtcctagcaagccatatgttcctcctccaatgcagcaacaacaaagacaacaagcaactgaggcccctccttaaccttccttagaagagttagtgaggcaaatgtccatccagaatatgaaatttcagcaacagacaagagcctccattcagagtctgacaaatcagatggggcagatggctactcagttaaaccaagcttagtcccaaaattctgacaaactgccttcacaaactatgcagaatctgaaaaatgtgagtgtcat

SEQ ID NO: 19246 - DNA, 334 bp, Glycine max
agcttgaatatttacaatatcttgctcgctgtctcaacgaatgctcctgttctctccacggaagcaactataacgtggcaatggtataaattgcttaagggagaaaatcttattggaaaacatttcaaccatcctccggatgatccatatggttcttggtatggaaactttacggtgccccttgaaaacccattcccagccaaaactaaaccagattccttaaaaatgagttctaaaggctcatctgatgatgacattgctgggtctgaggatgcgagtccgacaagtcacgacagatacacaacttcaatgaatcgctctgctggaaatgatc

SEQ ID NO: 19247 - DNA, 427 bp, Glycine max
tctgatcacctggagcacctccaaatcgcattacatactcttgcttacaatagtttcgttttaaaactgtctaaatgctcattcgcgacccagcaggtggattacttgggtcatctggtctctgtgaagggagtagaacgagtaccggaaaaggtcatagctgtgcaacaatggccgactcccaattccactcgtgccttaaggggattcttaggcttatccggattctatcggcgtttcattaggggatacgccaccctcgcggctcccctcacagctctcttggccaaggacaaattcaattggaaccctgaggctgatcgtgcctttcatcttctcaaagatgctctgtgtcaagctcccgtgctgcgattacctgactttaattccgaatttgtgattgagactgatgcctcgggaattggta

SEQ ID NO: 19248 - DNA, 223 bp, Glycine max
  unsure at all n locations
agcttttatcattagtttacttctgagttgtgtaaacttggctttcttcaatggttttgtcggtaaatcagcaagattatcttctgatttgcagtagatgagcttgatttttnctttgtcaactttgtccgtgataaaatgatacctagtatcaatgtgcttgttgctcccatgatctacagggttcttagcacgactgattgctgacttattatcaatcagt

SEQ ID NO: 19249 - DNA, 207 bp, Glycine max
agcttaagagatagttagatcaaagagcacttagagaaacaatttgtgagacctagtgtagcgtgtcaccctgcggagtgtcggtgttgttagtcaagaagaaggatgcgaccataaagctatgtgtagactatcgtcagctaaacaaggtggcgattaacaataggcaccctctgcctagtatagatgacctgatggactacttag

SEQ ID NO: 19250 - DNA, 420 bp, Glycine max
  unsure at all n locations
tcagctntgtccccaaggcttcatgtagactcgtccttaatcgcgaagtgaacctcggatccctgtcagatacaatactagaaggaatttcatgcaaccttactacttccttgatgtacaactccacgagtctctccattctatacttcatattcactgggataaaatgagcagatttggtgagtcgatctactatgacccacacagcatcatgtccacgactagtcttgggtaaactagatacaaaatccatagatatgctctcccatttccattccggaatctccaatggcttcaattctcccgatggtcgttggtgctcaaccttagccttttgacaggtcaaacatcttgctacatattcggctacatctttcttcatgccatgccaccaaaaacttctcttcaaatcttggtaca

SEQ ID NO: 19251 - DNA, 322 bp, Glycine max
  unsure at all n locations
taagctttccaacgggcatcgcttcatgttagtgaccgttgattacttcaccaagtgggaggaagcagcttcatatgctagcgtgactaggaatgtggtgatcagattcattaagaaggagataatctgcagatatgggttgcccaagaagatcatcactgataatgccaccaatttaaacaacattatgatgaaggaaatgtgtgaggatttcaaaatccaacaccataatttcacgccttattagccaaagatgaatggngcagttgaggctaccaataaaaacatcaagagaatcatccagacgatgactatgtcatac

SEQ ID NO: 19252 - DNA, 427 bp, Glycine max; identical to SEQ ID NO: 19236

SEQ ID NO: 19253 - DNA, 410 bp, Glycine max
  unsure at all n locations
tgtaggccttggatcttcttcatcaaaggagtcctttgcttcttgaatatcaatggccgcggaatggacaagaagaggagttgagaggagatgccactccaaggacaagatgagtcaagaataatctcaccaccatggactctatttatcgcccaagtgtcacacaaaatcggagggaaatctgaatctctattcaaatttcacttgaatttcaaattgaatttntggagccaaaatttcactaattatgattagtgaatgttagctatggttcagcccactaatccaagatcaagcctacactcctccactaatatgcttacgtgtcatgaggcatgtaaagcatgattgatgtgcacaaagtgtgactatatgatgtggcaatggcgtgtagcatgcacatgctcacc

SEQ ID NO: 19254 - DNA, 342 bp, Glycine max
  unsure at all n locations
tctggtgtgacatcttgacttgctttccaatctgacattcaccacagattatgccttcttctattttcagattgggaatgcctctaacagcacctttgtcaatgattttcttcatgcctcttaagagcagatgtccaaatctttgatgccatattttgacttcatcttctttggaggatagacatgtggaggagtaactggtttcttgaggtgtccatacgtaacacttgtcctttgatctgctgcccttcattagaacttcactcttctcattcgtcancaagcccctgactttgtgaagttacattgaatccttcatcacacaactgactgatgctgatc

SEQ ID NO: 19255 - DNA, 448 bp, Glycine max
  unsure at all n locations
gcctcagcaaattccttatttccagaagggaattctatcaatagacctccaatctttaatggagagggttaccactactggaaaacccgaatgcaaatttttattgaggcaatagatctaaatatttgggaagccatagaaatagggccttatatacccaccacagtagaaagagttacaatagatggtagttcatcaagtgaaagcataactatagaaaaacctacagatagatggtctgaagaggatagaaaacgagtacaatacaacttanaagccaaaacctaataacatctgccctggaatggatgaatatttcanggtttcaaattgtaagagtgctaacgaaatgtgggacactcttcgattaacacatgaaggaactacaaatgttacatgatctcngataaatacactaactcatgagtatgaattatttagaatgaat

SEQ ID NO: 19256 - DNA, 466 bp, Glycine max
tggaggaagaaagagatgaatgaagggagaggaagagaagatatcgattttctgtgctctaaatgagctatgaaatctgaagtttaatattcaaatgatcaaagttgataaaaatgcacacacaatgcctctatttatagcctaagtgtcacacaaaattggagagaaattagaatttctattgaaaactcacttgaatttgtggagccaaactctggagccaaaatttctctaattatgattagtgaattatagctatggctcagcccactaaattcaagatcaagtccaagattcccactaactatgcttagtggcatgaagcatgtaaagcatgaagcacatgcacatagtgtgactatatgatgtggcaatgcggtgtagcaagcaaatgcttaccttccaattcaattaaatctatttttcaacacacacatcatatattcacttaatgcatgtgaaatta

SEQ ID NO: 19257 - DNA, 410 bp, Glycine max
  unsure at all n locations
tganagtgtgtaaccaaccattntctcattgtagaacaccggtaacgtgtatactatcattgtgatcatctttttctctgtcattgaaggtgccacttgagctgtcaagtccctccacctctgggcgtattccttgaatgactcatgctcttttttacacatgttttgtagttgcgttctatccggagccgtatcataattgtactgatattgcctaacgaaggcaaccattaagtccttccaagaatagactcgggaaggctccaagttagtgtcataccctaattttgctcgcgattattacttgcgacatgcaacctttgattgcgcgtttcaagatacttgcgcacctttgttgcacaatatgtaagtcttgagacgcaccggaagtcacaaggagcagggttatg

SEQ ID NO: 19258 - DNA, 405 bp, Glycine max
  unsure at all n locations
agcttggcactgattntgtaggtataacatcattattcatgttcttaatttgcatgttaaatatggagaaaaatgtgtttttagtctttatatttttggtaaaatataattaagggttctgtacctttatattgataaatttaattttcccaactctaaacggcgtgtatttaatctcttttatttctaagatttcattatattttttaaagctattatatccataaattgttaatcccatcgatactaatttcgatctacttatacaaaatctcgatttaagctgcgaaagaaaaaaataacatgtaatcgagagacaagattctctagaagcgattagtcacttatacaaagatcaatatcagcaaaattagtgaatatttcatataaatactatgctaaaat

SEQ ID NO: 19259 - DNA, 391 bp, Glycine max
  unsure at all n locations
ngagcatatggatggcctttggctaaatcagcagcatgagccgtaatcttgtaagctataacgccagccttcacgtgatcccggtttggcaacccaagatgttcttttggagtcacataacacagaagagctgtacctagtgccccaatattcgcagcaccaattgcagacgcgatgtgatcatagccaggggcaatatcagtattctaatgaccaagagtgtaaaaaggcgcttcactacaccattctaactgtttctgcatgttttcacgaatcttgtgcattgggacatgcccccgccttcatctcatacctgtaaagtaacttaaagtaaaaaatataccccatcatcttcaagatatattgatggtaatatcgcctcacatgatga

SEQ ID NO: 19260 - DNA, 433 bp, Glycine max
  unsure at all n locations
tgtacgccttggatcttcttcatcaaaggagtcctttgcttcttgaatatcaatggcagcggaatggagaagaagaggagttgagaggagacgccacttcaacgagaagatgagtcaagaagaagctcaccaccatggcctctatatatagcctaagtgtcacacaaaattggagggaaatttgaatttctattcaaatttcacttgaatttgaaattgaatttgtggagccaaaatttcactaattatgactagtgaattctagctatggttcagcccactaatnnaagatcccctcccagattctccataagtgtgcttaagtgtcatgaggcatgtaaagcatgaacgatgtgcacacagtgtgactatatgatgcggcaatggtgtgtatcatgcacatgcttcacctcccctctacaatttaattgga

SEQ ID NO: 19261 - DNA, 445 bp, Glycine max
  unsure at all n locations
taacgcattntacctctaagggtcttgtaattgcataatggtggtcagtctctcgatgttcccaccatggtatagcttcaatctctgaccatttactatccatgttctgtgcggagtttctgactgagggtcaagtaattccacaactccatatggcttgacttccttcatggtgaatggtccagactatttagactttaatttgcttggaaacaactttaatcttgagttgaacagcagcacttgttgtcctggcctanagtccttctttagcagcttcttgtcatgataagccttcgtttttctttgtacagctgaaagactcataagcattcaatctcatctcttccagctccaagagttgcaacttcctcttttcccctaatagagcctcatcaaaattcaggaatttcanagcccagtatgccttatgttccatttctac

SEQ ID NO: 19262 - DNA, 369 bp, Glycine max
agcttaaacattcactttcgagcctcacttcaacattcaatttcgagcgtctcgatatatgacgggactcaatcagacatccgagtaaaaagttattgtcgcttgaaatggctcagagcttcaacattcaatttcgagcgtcccgatcgctcacggcactcaatcagacatccgagttaaaagttattgtcatttgaattggctcagagcttcaacattcaatttcgagggtctcgatatattacgggactcaatcagacatccgagaaaaacgttattgccgtttgaattggctcagaggttcaacattcaatctcgagcgtctcgatatattacgggactcaatcagacatccgagaaataaattat

SEQ ID NO: 19263 - DNA, 410 bp, Glycine max
  unsure at all n locations
tccatcaggatgtcttattgagtcccgtaatatatcgagacgctcgatattgaatgttgaacctctgagcattttcaaacgacaataacgttttactcggatgtctgattgagtcccgtaatatagcgagacgctcaaaattgaatgttgaacctctaagccaattaaaacgacaataactttttaatcggatgtctgattgagtcccgtaatatatccagaccctcnaaattgaatgttgaagctctaagccaattcaaacgacaataactttttactcggatgtctgattgagtcgcgcactataacgagacctcgaaatgaatgttaacctctgaccaattaaacgacataactatttactcggatgctgattgagtcccgaatatatcaaccctcgaattaatgtg

SEQ ID NO: 19264 - DNA, 397 bp, Glycine max
  unsure at all n locations
agcttgcacacaagattctccttgcctggcacctcaaaaccttcaggttgggtcatattgatgtcttcctctaaatccccatgcaagaatgcagttttaacatctaactactccaagtgaagattctctgcagctacaatactcacataactctgatggtagtcatctttacaactggagagaagatttctgtgaaatcaattccttgtttctgctgaaaccttttcaccacaagtctctccttgtatcttcttctatcgtcggattnttcctttagcctatagactcacctattctgtaacgctttctttccttctangaaattagttaaagaccacgtcttattcttttgaaggggtgtcatctcatctttcatcgctagctcccactcaatagt

SEQ ID NO: 19265 - DNA, 375 bp, Glycine max
  unsure at all n locations
tactgattgagaagattgaaaccacaataatgacatgtccatgctacgcatgccatcaaaaggaggcttatggtggtaagagaacaataatgatttatcggccattcatgctctccatcgtgaccataacagacgtatgtatctatgtagcattgctctttacagactcacctacagtttactatgtctttcaacccataaattgcgaatcattacagcatggcgcaatgtcattttgtatattaattagtttctactagaagctaccaccttttgttaatatattattntaaacctcatacagtcttaatttctcattatggactaaagtacatgcatacagaattaacatagcatcgacttaagcatttcatt

SEQ ID NO: 19266 - DNA, 347 bp, Glycine max
ttgcataccccaaggatccatcagtatattacttgtgaaatatagccacgagggcgggctcataggccactttgggatacataagacccttgtcatactcagagacaagttttattggccccgtgtgaagaatgatatccataagctttgcactatgtgcgtggcttgtctacaagccaagtctacggtgatgcctcatgggctatacacacccttacccatcccatctgcaccttgagtaaacattagcatggacttctgccttgggctatctagaacccaaagagcccgcactctctctttggcgggtggataggtttatcaagatggctcactttataccatgc

SEQ ID NO: 19267 - DNA, 415 bp, Glycine max
  unsure at all n locations
ntggatgcaaatcagtttggaaaactgaggggcaagctgggcatttgtctgctagaggaattatagcagctactgcaatctgaacgtgcccaaacgaatcacttaacattaatagcacgttcaccacaaagaaaattcgaccgttgcctcacacgcccctctacattcttcattcaaatttatatctgcttggcattcgtgtttttaccagcatttcccaatagccttctgagatttacgaaatcattccaaacgctctgcttttccatggctacctcaccaaaagaacttccgctcctggtcacccgctgtaccatcatctccgcaccaggaacaaccagaattcaacatccaacccatacaaataattcctgggcaagcttctgtccctgagaaactggttccagaagacaac

SEQ ID NO: 19268 - DNA, 300 bp, Glycine max
agctttgttatctactgaaggctctcgaagagtcagatgagggagatagcgttacggttacagaggagtggacaaagggtcttgtgggttatgaggaacccatatgagagaagcgaattgattttggaggaattgttgccataagggcccctgcaccgacctacagagaggggaatggtgatgaagaattgcgcgccacaagttaagattctgagtcatgactcggtgggtgggttcgtgactcactgcgggtggaactcggtgttggaagcggtctcttggggtgtgcctatggcgtcg

SEQ ID NO: 19269 - DNA, 402 bp, Glycine max
  unsure at all n locations
agcttattgtgtgttgatgattataacacatatatatgtatatgaattgttaaaataaattatgaattaatagttcaaataataaaattaaattgaaggaaattaatatattaagattcaacgataaatactttcaatgcattctagcctacttatttattaactttttttaattgataataatatagtttggtttaatatatacatgtttagtatgtaaatactaatatggtgtgacgtgcatatgattcatgaggcgggataacatgctgctttgggattataacattgtcgatnacactgagtgtatgtgataaattgagtatgtgtcgaattataagatacaagcgtattgagattttgtatgcatcgagctgtgagctatgaactatactattacac

SEQ ID NO: 19270 - DNA, 395 bp, Glycine max
  unsure at all n locations
agcatctactaagtcctcttcactatctctatcgagccacaaccagcttctgcaggtgtttcagcactgttacagtgttgcatattgaatctatgcagaatatcagtagcatatttttgctgtgtgagaacaattccttcactacacccttgaatttaattccagggaaatatgacaactcacccaggtcagtcatgtcaaactcatccatcagatttttcttaaattcattcacttttgcttcattgtttcctgtcaataacagatcatcaacataaaggcatagcatcataatgtcttcacccccagacttcacatacactccatgcttagacctacatttcacanaacccaaattggtcaagctcttatctattttcatgttccaagcacgt

SEQ ID NO: 19271 - DNA, 353 bp, Glycine max
agcttaatctttggcgtcatttagctcggttaaagtccaaggcttcagagatatttgacattatccttaagatgaacaaagatgaagcttaagctttggcttcactccaattatataatatgcttcaaatactcaccattgactggattccccccgcgtaatccacaacaatcaaatttggatactgatcaagcacagatgcaagagcactgtccctgtctgaaggaccatgcacatgaaactccttttcaccaatctgaaaagtcttgtctgacttctcttcacacccaaacgacacaggaacaacattcagttcagcagctttcgccgcattaatcacggtctctcccatt

SEQ ID NO: 19272 - DNA, 404 bp, Glycine max
agctttgagcaacttcaaacaacaacaactttttactcggatgtctgattgagacccgtaatatatccagacgctcgaaattgaataccgaagctctgagcaaattcaaacgacaataagtttttactcgtatgtttgattgagcctgtaatatatcgaaacgctcgaaattgaagaccgaagctctgagcaaattcaaacgacaataactttttactcggatgtctgattgagtcccgtagtatatcgagacgctcggacttgaatgccgaagctctgagcaaattcaaacgacaataacttttttcctcggatgtctgattgagtcccgtaatatatcgagacgctcggacttgaatgccttagctctgagcaaattcaaatgacaataactttttactcgg

SEQ ID NO: 19273 - DNA, 410 bp, Glycine max
  unsure at all n locations
agcttctatatattaatgaataaaattatcgatgcatgtgccatgttatttttgccctctcacacgcagttctgaacctccttagggttttgactaatgtccactttgttcttctttttaaattcctatacaaaatgggtcaccattccctttcaaagtcatgtccaccttaagtgagtgtttccagcaatagccttatcttggaatagcttatccttgatcgttagaagtacaactgccaaggtgaaacatgaaaatgttttgctctccaacgcaattagtcttgttgtcaaggccatgtggtcagcaactactgaatataaagcagcctcaatagcagcggcttctcttaactctccttcaaccatctttatcttgttntccaagtagtcaatcttgttgtctaaaat

SEQ ID NO: 19274 - DNA, 344 bp, Glycine max
  unsure at all n locations
agcttgatcttttagttntttatctctaatctttaatccctgaacgaactattcaagtttgtaattcgaactttaattatcttttaattcgttcctaaagatagatcgccaaatctgttgctaactgcacattaatctgttaaagactcacagattcatgtgtccagtattttcgggcaagatgtcctggacatcgtatgcgacattcgtggatcctgcagcttcaattcttcatttgacattttatcttgccttgtgcattgtgcaagccaatctgactccttgacataacgtggacatcatgtgcagcaacttcagctttccttcaatgtctaagtgcttat

SEQ ID NO: 19275 - DNA, 399 bp, Glycine max
  unsure at all n locations
tcagatntcagagctcttcagagcacaaaattcatgctcttctcttcctctcccttcattcatctccttcttactccaagctcttatccatggcctcctatggcggcgagcttnttctagactcatcttctccttgaagtggtgtctcctctctcttttccttctccattccgccggcattcatcttccaagaagaaaaggaatccattgatgaagaagatcctacgcctacaagctccaatggagcttacaccatgtggtatcaagagcatctccatctaggggatgttccttcgctccctctatcttctgtccggagaaatctctntaattacttggtcttcatcttattctccatgtatatcctccattatcttgtgagatggcgctgtctagagt

SEQ ID NO: 19276 - DNA, 409 bp, Glycine max
  unsure at all n locations
tgaatgttaatagtgcattggagaagagagcgcgatagggtacacggagaagaagagagcggagcacaataggtcgcatcaaatataatttaaaatgtacgctcaacatcggttttcaataaaaaactgatgttaacaaattgatgagaacgttaacatcggttttattcaacaaaccgatgttaagggtgcttccttaacatcgattttttgaaaactgatattaacgtcgcttcgttcacatcagttctcttcaaaaccgatgttaaggaatacacattatttanaattacccaccccatttacgtaacatgcggtntgtgaaaaaccgatgttaatccgccgatgttaaatctggttcttctagtagtgaaccataccatcaatatttcagttgattgataaaata

SEQ ID NO: 19277 - DNA, 282 bp, Glycine max
tgcttctacagttttgtacgatatatcagccaattgactctgtgtgtcattaaactctaatatgcactcgcccttttgaacatggccttgatggatccgacgccttattcaatatgctttgctctagagcgccgaatataatttttggatagattgatccccttcatattgccacaacggatacgcatatgtacaagctctcagccattatcagagagttgctgtctcatccaaatgatctgtgcacataaacttccagcataaatatattccgcttctgca

SEQ ID NO: 19278 - DNA, 458 bp, Glycine max
  unsure at all n locations
tcaagagaccgcttcaacttcaagaagatcttggaatgtggcatattcaaagagtcattgttactccaaaagtctaggtcaaggtgaattaaggagagagattgcaacacaaaactttttcattcaatcaatgagttccataggcatggagtccttccaagaggtactaacttatcttttttagatcaactgccaatgtgataatacacaaagtttagatcattttagacctatttctttggttggatgtttgtataaagttttggcaaagattttagctaatagaatgaaaaatgtacttgataaggtgattgatcctagctaaagtgctttcctagaggggagagaagttctacataattcggtggtggccaatgaggttgaggatgaagtaaaaaggggaaaaaagtcatgtttgttgctcaatgtngcatttgagaaggccttcaacttgatgt

SEQ ID NO: 19279 - DNA, 391 bp, Glycine max
tgccgccacggagttttccgactatgctcttgtgtggtggaacaagctacaaaaggagagagcaagacatgaagagccaatggttgatacatggacagagatgaaaaagatcatgaggaagcggtatgtgccggctagttactcaagggacttgaaattcaagctccaaaaactaacccaaggcgcacgggggcgaggagtatttcaaggaaatggatgtgctcatgattcaagcaaatattgaagaagatgaggaggtaactatggctcgatttcttaatggtttgactaatgatatccgtgatattgttgagctgcaggagtttgttgaaatggatgatttgcttcccatagcaatccaagtggagcaacaattaacaaggaagggagt

SEQ ID NO: 19280 - DNA, 454 bp, Glycine max
  unsure at all n locations
ggcctaattaacctgaaattgagaganaatgattattaaacacacaaaatggaagtactaagtatttattatctatacttaacaaaaaaatacttataacactacaaaataaccataaattggaagagtttgatacaatttacataagttttatacacaaaagttattcatatttaccgacgatcttcttacattcttattagcagcctcaactgccccattcatcttgggccgataagacgtggaattatggtgttggattttgaaatcctcacacactttcttcatcatattgttgtttaaattggtggcattatcagtgatgatctttntgggcaaaccatatctgcaaattatttccttcttaatgaacctaatcaccacattccaagtcacactagcatatgaagctgcttccacccatttgctgaagtaatcaatggtgactaaaatg

SEQ ID NO: 19281 - DNA, 406 bp, Glycine max
  unsure at all n locations
tctggtgggacatcttgacttgctctccaatctgacattcaccacaaattctgccttcttctattttcagattgggaatgcctctaacagcacctttgtcaatgattttcttcatgcctcttaagtgcagatgtccaaatctttgatgccatattctgacttcatcttctttggaggacgcacatgtggcgagtaactggtttcttgaggtgtccataggtagcagttgtcctttgatctgctcgccttcattagaacttcactcttctcatttgtcaccaagcattctgactttgtgaagnttacattgaatccttcatcacacagctgactgatgctgatcaagttcgcagtcagtcccttcaccagcagtactttgtccagactaggaagtccatcatggact

SEQ ID NO: 19282 - DNA, 458 bp, Glycine max
  unsure at all n locations
tatgctgcanatatttacaatagacctcctcaacctcagcagcaaaatcaaccacaacagaacaattatgacctctccagcaacagatacaaccctggatggaggaatcaccctaatcttagatggtccagccctcagcaacaacaacaacagtctgctccttccttacaaaatgttgctagcgcaagcagacatacattcctccaccaatccaacaacagcaacaaccccagaaacagccaacagttgaggcccctccacaaccttcccttgaagaacttgtgaggcaaatgactatgcagaacatgcagtttcagcaaaagaccagagcctccattcagagcttaaccaatcagatgggacaattggctacccaattgaatcaacaacagtcccagaattctgacaagctgccttctcaagctgttcaaaatcccaaaaatgtcagtgccatttca

SEQ ID NO: 19283 - DNA, 445 bp, Glycine max
taattccacttttgattccttaattattctttttagtgcattccttaattagtataattttacactttcggtcttctaatcaactatatatatagacaatttgattctctttgtgacaatcccaaattattctcgtaaaaatattttattttaatatttaatcaattctattagggctattcactgcccattatacctgtaattaataattgattattataattgattgtcataattaaatgaaactgaattattaacaaaaaaaaataaaatataaaaatattatataattgattcttttaatatataaaaatattatataattgattgtttatatcttaatattattttaagttaactatgttaaaacactaatatatatttgtaattatagcatgttgaagagtatgtatagctatatatctttaatagagtttaacaaata

SEQ ID NO: 19284 - DNA, 451 bp, Glycine max
tctctgcatgatgaattgccaaaatggatggatccatgcttattgatttcttttctgtgtatgtgacagggggggaaaaggagtgatgggcgaacacctgacggaatacgtccaattaactcgagatgtggcctattacctatagcacatggaagtactctttttacaagaggcgagacacacgctctgacccactttatttgttttccagtttatgcttttgatgatatctgttggtgtctatatatgcttatgcaagtcacattatctcttttctgtgtttgttagttctattagaagggagatagaatgatcaaacacaaaggaggaacaaaactaataatgctgactccttggacctttaacacacttctcatttaaagtctccaattgtaatcaacttggatataatctagaaactagtgattggaagtcagtattctgattactc

SEQ ID NO: 19285 - DNA, 430 bp, Glycine max
tttgtttgtggagtcgcctttgatctcaactgtaccatatggaataacattagtaacaacaaaaggaccaatccacttagacctcaacttaccactcatgagtccaagcctagaattatacaataacattttttgcccaaccacgaagtcttttttaactatcatgctatcatggaacttctcgtctctccctgcagaacttggcattctcgtaggcttctatgcggatttcatctaactcactcagttgcaactttctttcctcaccagcttgatccatagagaagttgcaagtcttcactgcccagtaagctttgcgctcaatttccactggaagatgacatgcctttccaaagacaacccgataaggagacattcctatgggtgctctataggcagtccgatgtgcccaaagagcatcatcaagcct

SEQ ID NO: 19286 - DNA, 450 bp, Glycine max
tcatatggagccatgccaatggtagaatgaacactattgttatatgtgaactctatcaacaggagagaacactcccaactccctttttgttctaatacatatgctcttaaaaggtcctccgacgactgaatggtccgttcagttcggccatcagtctaagggtggtaggctgaacttactctaagcttggtcccaacgctttgttcaaactcttccaaaacctagaggtgaatatagaatctctatcagacactatgctagatggcacaccatgtaatctgacagtctcactaatgtacagggagcgtaacttctctaaggaaaacctaatattgatggggataaagtgtgtagatttggtcaatctgtcaacaacaacccaaatagaatcaaaacctctgggggtcctaggtagtcctacaacaaaatccatggagatactatcccacc

SEQ ID NO: 19287 - DNA, 442 bp, Glycine max
  unsure at all n locations
ntgagctcagacattagagttacgttacctcgaagattccggtgagacagatccaagccctccaccattgagttgttaccacagctgacaccttgccaattgcagtaatctgagttgttgccatcaccccatccagggactctcagctcttggttgatggcatgtaatatatcttggtcccacgctcagaccaacaagttcagaacttgaaagacaccaagctaccagtatatacaacaacaagcatagaaattccatcactgtacagtgtacactgttgttctcttctcttctctgctgaagcgaagtgttagtgtttacactccactcaacagtgttcttctccaagagccaaaaaattggtatcaacactctaccacagcattaacaacttttgctgcttgttcttttcaccaaaaaaaagtgcaaactttctttcaca

SEQ ID NO: 19288 - DNA, 406 bp, Glycine max
  unsure at all n locations
agcttgcgatcacgcaagattgaattgtagagaagctttaagtgttcgagatcgtgaagagaatctggtaaacagcgaattgtttcgaagagtgaagctcttgtttcgagtgcttggatgcaagtggggtccaatgcgagggtgcggctgcaatcggcaattgactcggcgattcgccctgcggaacggtgcgcggaggcgcggtgcatgtancattcggcgaggaagctctgcggcgcgctgcgccggccgtcgacgattttcgagaagtggcggatggcctcggagtaaagcccggcgtcgagggcggcgagtgcggcggcgcggcggcggaggaggaacttaatgtggccgangagttgggccacgctctcggagtccgcgagaagggttcgcggcggagttg

SEQ ID NO: 19289 - DNA, 404 bp, Glycine max
  unsure at all n locations
tgtcttcaataccaatcaccttataattatgatccacagctttaccagattggcatcccccatggtaatgataaattgttagcacaatgtctatgcaatactgttctaaagagaaggaaatattagcatgtttaggcctcaagttaactggtaaattcaacatcaagtctattagatcttggaccgacatgttgtggtancaaaactttgagaatgcttttgagtttatcatatctatgacgattatcatgccttcaacacatttctttaagtcttctggatccttacaatagttgaaggtaactgatggctatcattcggatccacttgaggatatacttatttgtgtataaactttcctaattatattaagaggtctcacaaatatgaaacaaagaacaatc

SEQ ID NO: 19290 - DNA, 415 bp, Glycine max
  unsure at all n locations
agcttgtattattacaccatagctctgcacaaaatgactctaggatgtatatacttgtactgatttatttgctataatatataatacatacatattttgcctatcaaaaaaaaatccttgactttctcaggcaagtcttaaaagaaagtatcacacgggctaccttgttttaagaaatacctcaataagaaaaaccacactaagtcttaccttggcaacagcataaacaccaaaaagacccgtgtccttgtaattggtgttgaaagccataatgctctcagcaacttcattaatgccaattcgctgtgctaactccgaactgtttatagtcaaaatgcattcagttagtatcagggagagaacttttcctttntcaggaaggggcgttcaagtcacataccccatgtgttttcca

SEQ ID NO: 19291 - DNA, 370 bp, Glycine max
agctttgaatcgattacacacatactataatcgattaccagaagagattttcagaaaatattctcaattggcacatcttttcatttggttcttgaatggctatcaaaggcctatatatatgtgacttgagacacgaatttgctaagagtttttaagaacaaaaaggtcctatcctcttaaaaagcaaaatccgtttatcctcttacaaattccttggccaaaacacttgtgattcaataaggaattatttgagtgctcaaattgctcaatctatctctttcaagagagatttcttcttcttttcttctttattctgaacagggattaagagaccgagggtctcttgttgtgaaagaattctaaacacaaa

SEQ ID NO: 19292 - DNA, 413 bp, Glycine max
agcttgtggtgcattatattacatctatacaaaggaattttttatggggcagcctccaagactccaccaagattccctgggtgaggtgggacatagtctgcctacctaagagtaaaggtgggttaaggatcaaagatttgattaaattcaatgaggctttgcttgctaaatgggggtgggagttggaaaataatcagaatcagttgtgggccagaattctattgtctagatatggtggttggagggatttgatttctgataggaactgcagtttagactctccttggtggaaagacctcaaggttatcttcaagcagcagcagagcaacacaatttgcaatcacctgaagtggaagctgcgatcgggagataaaattagttcttggaaggataagtggctacatcataatctg

SEQ ID NO: 19293 - DNA, 399 bp, Glycine max
agcttgtgaccatttgaataactcaagagcttgcattgttcaattttgagcgtctcgatatattatgcgccttaatcggacctccgagtgaaaagttatgaccatttgaataactcaagagcttccattgttcaatttcgagcgtctcgatatcttatgtgcctgaatctgacctccgtgtgaaaagttatgaccatttgaatttctcgagagcttccgttgttcaatttcgagcgtctcgatatcttatgcgcctgaatcggacctctgagtgaaaagttatgaccatttgaataactcaagagcttccattgttcaattacgagcgtctcaatatattatgtgcctgaatcggacctccgagtgtaaagctatgaccatttgaattgctcaagagct

SEQ ID NO: 19294 - DNA, 388 bp, Glycine max
  unsure at all n locations
agcttttggaagaatcaagaagtgccttatgaatcctcccgtgcttatgccaccagtacctggaaggcctctcatcttgtacatgacaatcttagacgagtcaatggggtgtatgctagggcaacatgacgaatctggaaagaaagagcgcgctgtttactacataagtaagaagttcacgacctgtgaaatgaactactccttgctcgaaagaacgtgttgtgctttagtatgggcatcccatcgcctaaggcagtacatgctgagccatactacctagttgatatccaagatggacccggttaagtacatctttgaaaagctagctctcacggtggcaagtcctgctatccgagtttgacatagtctangtcacccaaaaggcgat

SEQ ID NO: 19295 - DNA, 410 bp, Glycine max
  unsure at all n locations
agctttaacagtataatctgagctagctgaataaaaatctgacatgaagcagttattaaggtaatcattgcttcccatgcctgaaaagaatagacatttgtttaggtagctattaagtgattcattgtctcctctgaagaaccttctcaactgctgcactgtgttgtcaaagttagccacttgctcattcaatgatgtatgagccccctgcaaacaattacataagaaaatcagaggaggtgtggctcacgaattattgtgcctcacagaacgatatgtacatttaatatgtgcttaatttctcanaatactcatgaatatgaatttgcatacaaggttacttcctgtttcttctctaatgcctgctgctccagatgcatagctagctcctcttaatagtctcaaacccc

SEQ ID NO: 19296 - DNA, 413 bp, Glycine max
agcttgcaccatgtgcctcagcagcacaagatgagaatgctagtgtttctcagagttgctgtgctcacgtgaacaaaactgcgcagaaccctagttgactctgtgcagttcttctctctatcacagccaagatggctggcgtcaaccctcaagttgctgtcaccatccccaagcgttgtaacctgcctaatcgccctgttggttacaagtgtggacgtaagtgcgattaattaataattaccccttctttatatatacaaaggagagttactcacgtgacactactttgataaagatgctataaaaaaaagactattcaattatcaaaattgaaagaaatatacacatatgtatatatataaatatatatatatatatatgactctttctatgataactcttaagcttaacta

SEQ ID NO: 19297 - DNA, 412 bp, Glycine max
tttgcaagtcttgcagcacactagcaaacgtagaattatttggaacaacagacgactgcctcattcgacaaaacaactccaaagcctccctacttttatcactctgagcataccgcgctatcatgagactccaaggaataagatcatctttcggcatttcttcaaaaaactgctgcgtctcagcaatctctccagacttggttaacaattcaagcagcacagtgccaacataaagatccctatcataacacgctttcaaagcacatccatgaacacttttcccaacctcaaaattgttcggtctaaaccccataaccctcatctggcagacaagtagcaacgaatcttcatggcagtaattctcagcatagcaagccatcatcccagtccaagataccatgcccttacaaca

SEQ ID NO: 19298 - DNA, 404 bp, Glycine max
agcttatttgaagtgaatggattagcatgggcagaaatgtctccgcattgattggtaaatctgttcctcaaattcctgaaaaatgcaaagatccaggtacattcagcataccttgtattatagggaatagtaagtttgacaatgccatgctaaatttaagagcttctgttagtgttatgcctctgtctatttttaattctctatctctaggtcccttccagtcaactgatgtggtaattcatttagctaatagaagtgttgcctaccctgttggtttcatagaagatgtcttacttagagttggtgaactgattctccctgttgattcttatattttgaatatggaagatggattctctcaaggatcagttcccatcattctaggcagaccctctatgaaaact

SEQ ID NO: 19299 - DNA, 397 bp, Glycine max
  unsure at all n locations
agcttgtctcatataatgacgatctcgaactgattcaccgttggattgttgtgaaatttaagcattaggatcgcaacgcaattccaagaattctaaccgttggaaattgtgatatgatgtctgggctgagataaatatccatcgcatcgtaaccttttcctttctccgagaaacgcagagttgtcttggtaaaactacaatcccggtttcgttaaccgttagattatcgtgaaattcttatattttgttcgtgatccaatcacgcacacctncaccattgggatttgcacaacagtgtctatggagggagaaatatgcatcacacgaagcagtatagaatggaggcttcaatcgtttctctatctctctaatgtttgggaactctatcagagcaatc

SEQ ID NO: 19300 - DNA, 415 bp, Glycine max
agcttatctgctttaataaactctgggccagtattagctaatattgctcttggtacgtgtgattaattcaagtttcacattggctagagataagacaaagatagaatatataagtgggagacaaccctcactctatgggctaactgttaaaattgagttaggtccaaactcgcattctagatggtatcagagcctatcttagatctattaacaggctacccgccatgttatcagcgcaccatacccaaaagtgctgctgggcatgaggagatgtattgagaaaaacctcggtcccacattgattaaagataacgtcaagatagattatataattgaggtgcaaccctcaagttgaagtatgtatgtcatgtactaagcttcttataaataaagtcaacctgaggccaagtgattc

SEQ ID NO: 19301 - DNA, 404 bp, Glycine max
  unsure at all n locations
agctttataattgtttatatggcttgaaacaagcaccgaggcagtggtacaagaagtttaatgagtttatgagcaactcaagattcaacagatgtgacatggaccatttttgctacgttaagaaatatactaataactatgttatccttgtcgtgtatgttgatgacatgttgatcgcaggatctagtatggcagaaattaacaagttgaagcagcagttggcaaaaaaatttgaaatgaaggatcttggtccaactaaacaaatccttggtatgagaattcttataaacaaatcanaaggaattttanagctgtctcaggagaaatatatacacaagttgcttgacaggttttaccttgaagattctaagaccaggaatacccttttgggatctcatttgaag

SEQ ID NO: 19302 - DNA, 245 bp, Glycine max
agtcttttcactcggagatgtgattcaggcgcataatatatcgagacgctcgaaaacgaacaacggaagctctcgagaaattccaatggtcattacctttaactcggaggtctgatttacgcgcataatatatcaagacgctcgcaactgaacaacggaagctctctagaaatccaaatggtcataacctttcactccgaggttccgattccgtgcatgatatatccacacgctccaaattgaac

SEQ ID NO: 19303 - DNA, 284 bp, Glycine max
tggagccaagcgagagctcaaaaactagacaaaataggtaaggatgtgaggaacaaggctagacttgtgaccaaaggttactcacaataggaaggcatacattatattgaaacttttgatcctgttgctcatctataggcaatatgcaatatactatcctttgttgctcatcatggaatgatgcggtatcaaatagacgtaaaaagcactttccttaatggacttatcaagaagtttatgtggaacacacccctgggtgtgagaggactatctaccctcatcat

SEQ ID NO: 19304 - DNA, 381 bp, Glycine max
agcttcagtccctgagattttggttcccagaagacaacagggagtgaagattgctgaaaaccctagctctgcaacaagtcctagggaagtagacccggagatggacaagaaaatccgcagtattgtgagtagcattctgaaagatgcttctgtgcctgatgctgagaaagatgttccaacatcttccaccccaagtgtttccgtgcctgatgctgagaaagatgttccaacatcctccgctccaaatgctgaagcccttccttcacccagtgaagaggaatcaacagaagaagaggatcaagcctcagaggagactcctgcaccacgggcaccagaaactgctccaggtgacctcattgacctgcaagaagtcgaatctga

SEQ ID NO: 19305 - DNA, 358 bp, Glycine max
taatattcgattattattcttgtggaaccttcacccgacgaagacactgacaaaaacttatcttctccttcttggacaaagtatggcaggctgggggcaaataaattttcttcccatcaaaccttggatgcaactgtgatcttatacccatattaactagatcttgaccggtattcaagccatccttcgtcttgccttgaatgttaaggagcgttccaatcacactgtcacaaacatttttctccacatgcataacattaataccatgtctaaccgtcagatcaacacagtacggaagatcaaagaaaatggaccttttctttcatatgcaactctgacttttattctttttttgggt

SEQ ID NO: 19306 - DNA, 368 bp, Glycine max
tgtttgaatacaaagagtttactctgctaagcaaacaacaaagggtctatgttctcgttttttaccgcccaatacttttgacaaaatttcaccacttgcgtcctttagcgtccaatacttttggtctggatgcactgacgtatagaagggatcatatcattcctttgtattgggtgccatcctctttctttgattcctcgtccagttcaagatgtgtactcgaatgcatgcgtgtcttcattccttttacatcaaccattttgaacttttttagaagttcattcacatacttggtttgatgaactgaaatgcctttatctatctgcttcattctcgcctaacgcacaatttacgtccctatcatactg

SEQ ID NO: 19307 - DNA, 330 bp, Glycine max
  unsure at all n locations
actggatgctttggtcaacttgagaacctanctggccttgaatcacaaatctggagctgtcttaagggtttgtggggtgcgcccctcccctgaccancatatanacctttggccttccatgcagcaacctaaagcaattgagcagcctgaagcttatgcttgaaatatttacaatagaccttctcaacctcagcagcaaaatcaaccacagaagagcaattatgacctttccagcaacagatacaacccctggatggaggaatcaccctaaccacagatggtccagccctcagcaacaacaacaggagcctgcttcttcctttcaaaatg

SEQ ID NO: 19308 - DNA, 352 bp, Glycine max
agtttgtatcatctactttctacaaattgagggtttcatcaaagatttgtattctacaggataccaataccaaggtgaggattggtacaattgaagtgaatcgcggcctctatcaattcacccccgaagcaccaaaaacacataccatatgttctatcattacacacccaaagtgtctaatcctccctgtaaatctatggcattctcgtatgggtcaccccttctccgaaagattacaagccatgcaaacatacctatcctttcttaataataacaagagtttcatttgtaatacttgccattatgccaaacataagaaattaccttttcatctaacacatctcatgcatta

SEQ ID NO: 19309 - DNA, 210 bp, Glycine max
agcttgaagtacaagaaatgagtacaaagagagggagagggggggggcaccaaatctatacctcaaataaggtctgaactttgaagtttaatttctcacatgatcaaagttgaaaaatgcacacacacggcctttatttatagcctaagtgtcacacaaaattggaggggaatctgaattttattcaaatttacttgaattgaattttga

SEQ ID NO: 19310 - DNA, 291 bp, Glycine max
atctttctgctttcttactccacatacaaccagatcaggatgcacactccacaccacgagaaaacgacattcactactaaagatgccaatttcttttacatggccatatccttcggccttaaaaatgccagtcctacataccaacgactgatggactgagtctttagacaatagatcggaccaaacatccacgtatatgtggacgacatggtcgtcaagtctaaaagcatagcccaacacgtggcagacctacaagaattctttggggaactctgcaaatatgacatgtgc

SEQ ID NO: 19311 - DNA, 337 bp, Glycine max
  unsure at all n locations
agtttcacatagctgtcagctaaattaggagccatgaagaagtcaacatacccatctaacattttcagatgcccagcctanacccatgagaagggagaagaaagaaaaagggcatgttactgtattgaaatccatggagatattctaccagaagaagcatgtgtatcaactaattaatcacctgtatcccattacttagagcaccaccaaaaaggataagtattgaatcacatacaccactggaatcacggatgacaacagcattgaccttaactctctcacccaaaaccaaccaagggtaaggaatggtctggtaacgtgcattcactgaattctg

SEQ ID NO: 19312 - DNA, 316 bp, Glycine max
agcttgtagcatattgaaacctcaatatatcgagaagctcgacattgaaagaagaaactctgagcaaattgaaacgacaataacttttcatttggatgtccgattgagtaccgcaatatatcgagctgctcgatattggaaacataagctctgagcaaattcaaacgacaataactctttactcggatgtttgattgagtcctgtaatatatcgaggcactcgaaattgaaaatcaagctcgaagccaattcaaacaacaataagtttttactcggatgcttgattgagctccttaatattttgagacgcttgaaa

SEQ ID NO: 19313 - DNA, 328 bp, Glycine max
agcttgccattaattgtacatctggtgtggaaaatattttctctttgggtgtcgtccagtggctgcatctgacttcacaagagccttctcaccattagcatatcaccctgcatagctttctcctcaagctcttcttccacctcttcttcttcactgatttcagattcactggtgatttctccatctgccttcatgatcatggctctcctggttggacagtcaaaagcaatatgtcctctgcctaagcatttgaagcattttatgtttctggtaccggtgttggatcatggcgtacaattatgcttagctctagctactgacattccat

SEQ ID NO: 19314 - DNA, 350 bp, Glycine max
  unsure at all n locations
agcttgtgcatccaataccctgatgaggatgtcccatatgttcttaaaactggactgattcatttgcttccaaagtttcatggccttgcacgtgaagacccgcacaaacatttgaaagaatttcacattgtctgctccaccatgaaacccccagatgtccaagaggatcacatatttctgaaggcttttcctcattcattagagggagtggcaaaggactggctgtattaccttgctccaaggtccatcacgagctgggatgaccttaagagagtattcttagaacnaatnttccctgctttcaggaccacaaccatcangaggatatctcacgtattacacaactcagt

SEQ ID NO: 19315 - DNA, 415 bp, Glycine max
  unsure at all n locations
aagagacaaatattccaactgacttagattagcatattctttntgaatgacaaacaatgcgcctaccagggaaggagagtctgctgatggaatctcccataaccataaatgagattttggatgttagcatttcgtttctaaatgaccatttagaggaaacactgggttcgacaaaaatagaagaaatccactcaaagtgtatcaatctcgcacaggtaagtgtttcatcctaattccgaaccatagatatgtcatgacttgactttgcaaattatttcctatcaaatcaaaaattacatgcgtgatcatggatcaatagggcttcccttgggaatgggttcttttggtggtctcttctttcggcttttgcgtgtatttggcttttgattctcctggctttttctttttctgttct

SEQ ID NO: 19316 - DNA, 304 bp, Glycine max
  unsure at all n locations
atcttgggtacactangaacacacaccctatcctgaaacctcaagactccatcagttcccactctaaaactactctctctccctgcaactatggactataattgggctgacaagaatgggtcagacttctgaccctcacggatcttgctcaagagttcgctggtgactctcaacatacccaacttaatgctactacaggtgatctcacatgccaaactcatgtctctaaactgctctaagaagcccaactctctaacatcaaaccagacatttgaaggatttcctacttacgcatcactactac

SEQ ID NO: 19317 - DNA, 356 bp, Glycine max
  unsure at all n locations
agctttgaaagtatattttgactaaatacactcaaaagggaccaaattgtgacaatatttgactaatagcattaatggtttcaatgctaatacgatatttttattttatatagaaatatagtattgtattagcatgagaaaacataaataaaattaagacaaagattaaaacaacttaaaaaagaaaaaatacagataatttaatttaataaattatgtgagctaataattaatgtttttttgtattgaataattagtttatatataataataaatttaattatatgatataagttggatcgggttgggttaaaaaaatataacttggtatccaacccgtatatgattangtctta

SEQ ID NO: 19318 - DNA, 345 bp, Glycine max
  unsure at all n locations
agcttttctctgtatacatggtccggaattgtggaatncaccgcactcctaagtccctctttgctccttgccttgttatgaacccagctcactatgcccttattttccccaaattctggttcagttggccttttcccagttactagttccatcaacaccactccaaagctgtacacatcactcttctcattcactttgtacgtgtagccatattctacaccaattcaaacaaaatccatacattaataagcatgattaaagatcgcaaattaacatacacaatacactacaactcatctcttatcaaaagacaggagctactactcaatgctaaccaggagcaat

SEQ ID NO: 19319 - DNA, 287 bp, Glycine max
agcttgaaggcaaactggatgcattggtcaacttggtaacccatctggccttgaatcaaaaatttgtacctgtcgcaagggtttgtggtttgtgctcctctgctgaccaccatacagacctttgcccttccatgcagcaacctgcagcaattgagcagcctgaagcttatgctgcaaatatttacaatagacctcctcaacctcagcaacaaaatcaaccacagcagagcaattatgacctttccagcaacagatacaaccctggatggacgaatcaccctaacctc

SEQ ID NO: 19320 - DNA, 302 bp, Glycine max
  unsure at all n locations
tcactaaagcggtgatccatctccacacatattttatcaatagcaacatanaaaatctctgcacggtaatgatgaagaatagtgatagtcctcccttctgctcttgaacgaccccgaactggtatttcgtcatccatatttggtaccagaatactnttagcaacacaaaatccttggacatcggcaaaaaaattattccagccactctctctcattgtgcccaaccgagctttgacaacatcaactaattccatggcattcacaatattaagatcttntctttgcaatatatttgaaagctc

SEQ ID NO: 19321 - DNA, 273 bp, Glycine max
  unsure at all n locations
gggcctttccaagtggaaggccttggaggaaagaggtatccctatgttgttgtggatgatttctccagatttacctgggtcaactntatcagagagaaatcagacaccctttgagtattcaaagagttgagtctaagacttcaaagagaanaagactgtgtcatcaagagaattaggagtgaccatggcagagagtttgaaaacagcaagtntactgaattctgcacatctgaaggcatcactcatgangtctctgcaccatcacaccacaac

SEQ ID NO: 19322 - DNA, 255 bp, Glycine max
ctcgtattgcatcaccattggtggaggtctaccaaaaactgcttgaaatggtgtcatacccaagctttggtggaaggaagtattataccaaaattgagcccaaggtagcatagtaacccaactcataggatgatcaaatacaaagcaccttagatacatctcaagggtcttattaagattctcagtcaggccattggattgagggtgatatgaagagctcatggccaatgttgtgccttgagctttgaataattg

SEQ ID NO: 19323 - DNA, 294 bp, Glycine max
  unsure at all n locations
atttaggattccattttctagtaccgtggccaaaatgaactcctgcttccatcatctcttccaagattatgttccaatatctttntgtcatttatatttatccccacacttttctttcatttcanaatcganattctataaattttttgaaatgaaagaaagagacccggtatactgaaatagaaataagtgttccaaaggaaccttctcttctaccgaagattggcctttgataaatgatcnnggccatttttctatttaataattaatatgaatattctctttattatcttt

SEQ ID NO: 19324 - DNA, 341 bp, Glycine max
  unsure at all n locations
tcaactttgatcatttgaaaattaaatcttagatnncagagctctnttagagcacaaaaattcgtgctcttctcttcctctcccttcattcatctctttcttcctccaagctcttatccatggcctcctatggtggtgagcttcttctagactcatcttctcctcgaagtggcatctcctctctcttcattctcgattctgctgccattcatcttgcaagaagcaaaggaatccattgatgaagaagatcctatgcctacaagctccaatggagcttacatcatgggggacaaaggtatagtgcttttacaactctctcctccactacttgtatgaatatg

SEQ ID NO: 19325 - DNA, 337 bp, Glycine max
ctccaataaacctcctgaccttacagcaaaatcaacctcagcagtagaacaattatgacctctccagcaacagatacaatcccggatggaggaatcaccctaatcccagatggtctagccctcaacagcaacaacaacagcctgctccttccctccaaaatgctgctggtcccagtagaccatacattcctcttctaatgcaacaacaacaacaacaacgacagcatttactgagacaacaatccactattgaggcccctcctcaaccttcattggaagaatattgacgcaaatgacaatacagaacatgccagttcagcatgagactatagccctc

SEQ ID NO: 19326 - DNA, 363 bp, Glycine max
  unsure at all n locations
atttttatctcttgttccatcaaagcaaacacatgaataatcttcctattaagagcatacacttctatattggtcttgcctaggtgatacatcaattgaaaattatagtctttcataaactccatgtaacatatttgtcttatgtacaaacaaatacttccaactcatgagatcagtgaacacatcaacctttgcttcagaaggataatgtcttcatattttcaaaacaaatatcatcacaacaattctagatcatgtgtaggttagtgtctctcacacatcttcaactatcaagatgcatatgctataaccttcctatgttacacaccaatatgcaactcanaccttgataagagacatcat

SEQ ID NO: 19327 - DNA, 371 bp, Glycine max
tatcattttttcttatacaaaaatgaagctgggaggccacttgttaaacaagtggccacaaatatcttaagaaggggggttgaattaacatattgcaaactatttccccaattaaaattttattttaattctaatgcaagttacaagttcccttaaaaatgaactcttaaataatgattcaaataaaacaatctgaatataaatgcacaacaataataaataaaagattttaagggaagagaaagtgaaaactcagatttatactggttcggccacaccattgtgcctatgtctagttcctaagcaacccgcttgagagtttcactatcttgtaaaatccctatacaagttttgaacacacaaggacaatc

SEQ ID NO: 19328 - DNA, 292 bp, Glycine max
aaacctccggggcagcaaacccaacatgagcacaataatatgacctttcaagcaatagatacaatccaggttggaggaatcatccaaatatgagatggacaagtcctccacaacaacaacagcctgcccctctatttcagaatgctgctggtccaagcaagtcatatgttcctcctccaatgcagcaacagcagcaacagtcacaacaaagacaacaagcaactgaggctcctcctcaaccttccatagaagaattagtaaggcatatgaccattcagaatatgcaatttca

SEQ ID NO: 19329 - DNA, 331 bp, Glycine max
  unsure at all n locations
gaaattctgatactggggacagatgtcgtaccggatgtcacgacttcacgcttcagaacatgcagattatatgtgtctgtatgaacagattaaacaagtaaataacacaagagaattgttaacccagttcggtgcaacctcacctacatctgngggctaccaagccacggaggaaatccactaaaatagtgttagttcaaagtctaacagccactgtttacaaccttctcacctaaccactacccgtgcaatctctacctaagagccactcttagatatgagaaccctgctcactccctctcaaccacactcccgtgtgtacaaataaatc

SEQ ID NO: 19330 - DNA, 367 bp, Glycine max
  unsure at all n locations
tagcttgagatgcctgacctttagcaaacagtatgtattcttctgcgaacagtaaatgagaaacacgagggccatttgaggtcaacttaactggcttccacctcacctcccatcagacactacctaagagatcatatcaccaagcctctccatacatgatacaaataaatatgggaacaatgggtctccctgacgaagccctctcacaggaataaaactattttttgttctacctccattccacatgatagaaatagaagtagatgacagagcatgtataatcacagacataatggtattatgaaaataacaaaaatnaaaaagagtttcccaccaacaaaatcctagttcacacgatcatatgcct

SEQ ID NO: 19331 - DNA, 361 bp, Glycine max
  unsure at all n locations
agcttgccttgctcatgatatatttganggacttatgatcactatgaatgacaaattccttgngataaaggtagtgttgccatgttttcaaagcccgtactaatgcatacaactcctaatcataagttgaatagttaagggtaggaccacttagcttttcactaaaataagcaattggatggccttcttgcatcaacacagccccaatcccaacatttgaagcatcacactcaatttcaaaagattattgaaagtttggcaacgcgagtatggnggcattagttagctnttgcttaagaacattgaaagcttcttcttgtttctcttcccatttgaaaccaacatttttcttgagcacttc

SEQ ID NO: 19332 - DNA, 329 bp, Glycine max
  unsure at all n locations
acaaganaaaaactagnatatgagtacatggataatggaagcctacactcctttatttttggtacgtaatatgaagaatgctttcataattcgattaagtggacttgcatgtttgtttgtttgttttgctttttaattccagtcacaattagcggctctttaatcttgaatatcttatattgaatgaatagcttgctttgtaaaatcacagataaaatanagggtaaatttctggattggcctcgacgcttccacataatatttggaatagctcgaggacttctgtatcttcatcaagattctcgattaaggattatccatagagatct

SEQ ID NO: 19333 - DNA, 210 bp, Glycine max
attatatgccctaatctgactccgttgattagtatgacaatttgaattctggagagctgccgttgtgcaatttcgagcgtcttgatatattatgcgcctgaattggactctcgtgtcataagtatgaccatttcattttctcgagaccttccgttgttcaatttcaagcttctcgatatattatgcacctgaatcgtgacttcgtgtgac

SEQ ID NO: 19334 - DNA, 383 bp, Glycine max
  unsure at all n locations
agcttaatgctgtatggtttgtaaacaaacataaggcgaggcttgttgtgaagggatatgcgcagatgttcggggtagacttctcagaaactntntcttcggtttccaggttggataccataaggctgttgttagctcttgctgcacaaaaaggttggattatacatcacatggatgttaaatcagcctctttgaatgggcacttggaagaagaaaattttgtagagcagcttgaacgatttgtagttcatggacaggaggagaaagtctatcggctgaaaaaggccttgtatggcttanagcaagccccaacgtcttggtatggcagaattgatgcacatttgataaacttatgctttgaaaaatgtctaagtgagtttacc

SEQ ID NO: 19335 - DNA, 330 bp, Glycine max
aaaaaatatgcttaatgcgactatccatgctcgtttgcttgtttcaacccgtacaagaccttgtttaatctgtaaactttatgctcacttccaatcttgacataacccggtggttgttcaataaatacttgctccttcaagtatccatgtaagaatgttgatttaacatctagttggcaaatgggccatgaattttatgccactaaagcaatcatcaatctgatcgtgtcatgtcttgcaacttgagaaaaaacttctgtatagtcaatcccatattgttgcttgtatcccttcgccaccaaacgtgccttgtacttgtcaacttcacca

SEQ ID NO: 19336 - DNA, 356 bp, Glycine max
catcaagcttttttttttgtgcatagaatgtggggaaaaactagtaagtgtcatgaatctctgacataagcttcaaccaattaacattgtttgaatgacaactgttgtagttgcaccgcaatcacatagtttgtccaccatggtatgctttatgttcctattggttatagttttggtatgctttatgttcctttggttatagctttggtggtagaatgtttaatttggagtccacaagaggaggatctccatatggtgctggagttattgctggagatggtagaagacaagcaagtgaaatggagctggagctcgcagagtatcatggcacgtatatatgaaattagcccataaat

SEQ ID NO: 19337 - DNA, 446 bp, Glycine max
  unsure at all n locations
tcgactcatgaacaggggatcttgatcgtgtacgangctgcngngcatgccgtgaatctttccggtggtctccatgaatatcttanccactgtagtagcagtgtagtgcaccggaagtatccccatatgcacccctttggagaaacggtccaccacgaccaggaccgccaagggcggcaagccaactataaagttgagggagaggtcctcccaaggtctcgtcggaattggtagcggacatagtaatctctggctcctacggtggtcattcttggtctgttggcacacgatgcacgtggagatgaacaactggacatcctgcttcatagatggccagacgannattgcactgatgcgagccaaggtctttgtattctcatgtggccgccagtgggagtgttgtggaattctgcgacgatggtggagatggcctgaagacctttggg

SEQ ID NO: 19338 - DNA, 368 bp, Glycine max
  unsure at all n locations
agcttganaaattctcantcagatagttattagtagcaccaaatatgatatcatccacatatatctagatgattaggaattgacttctataatctttacgaaatagagtagtatctacctttccataatctttgctttaaaccatacaaggctttattaagtttgaatacatgatgagggtagatagaactctcaaacctagggggttgttccacatagacttcttccttgataagtccattaaggaacacactntntacgtccatttgatataacattataccatgatgagcaacaaaggatagtaaaatgtgtatcgcctctagacgagtaacaagaacaaaggtntcactattatctataccttc

SEQ ID NO: 19339 - DNA, 377 bp, Glycine max
  unsure at all n locations
agcttgaatcggtctctcagtgtgtataaagttatgagcattntaattgctcgacagcttccgttgttcattttcgagcgtctctatatgtgatgcgccttaatctaacttccgtgtgaaaagttatgaccatttgaatttctcaagagcttcctttgttcaattttgagcgtctcgatttgtgatttgcctgaatcggacatccgtgtcaaatgttatgaccatttgaatttctaaagagctttcgttgttcaatttcgagcctctcgacatattatgcgcccgaatcgggcattcgtgtgataatttatggccatttgaatttctcaagagtttccgatgtttaatttcgagcgtatcgatatattataagcctg

SEQ ID NO: 19340 - DNA, 436 bp, Glycine max
  unsure at all n locations
agctttttatatattcgggactcaatcagactgcgagaagaagtattgtcctttgaatttgctaacgcttcngattcaatttcgagcgtctcgatatattacaggactcaatcagacatccgagttataagttattgtcgtttgaatttgctcagagcttcaacattcaatttcgagctgttcgatatattactggactcaatcagacatccgagtaanaagttattgtcgtttgaatatgctcagggcttcagtattccatttcgagcatctcaatatattacgggactcaatcagacatccgagtaaaaagttattgtcgcttgaatttgctcagagcttcagtaatccatttcgagcgtctcgatatattacgggactaatcagacattcgagtaaaagttattgcgtttgaattgtcagagcttcacattca

SEQ ID NO: 19341 - DNA, 272 bp, Glycine max
tgaagctctgataccacttgttggacaagtggcctcagatctcttaacaacgggggggttgaattaaaatattcgaaactctttcccctcattaaaaatctatcttactttttacttaagttatgaattcccttaatgacaatcttgttatatattaatccacatgaagcaacttgactatgaatataaagcactaatacataaaggagattatcggaagagagaatgcaaactcaattatatacatgttcggccacacacttgtgcctacg

SEQ ID NO: 19342 - DNA, 351 bp, Glycine max
  unsure at all n locations
agcttttcatattcttatttggtggctngaattaccttacacatacaaggcttgatatagctcgtagtgtgagtgtagtttcaagatatttgcactctccaactaagcaacacttatgtgcaacaaggagggttcttaagtatgttgcaggttcaatcaaacttggagtactttatgagagtgtggataatttcaagttggttggctatagtgatagtgattgngtagggttcttagatgataganagagtacatcagattntgtattcagtcttggcttgggagccatcacgtagagctccaagaagcaagacacagttgctttatcatcatctanagtngaatatgtag

SEQ ID NO: 19343 - DNA, 276 bp, Glycine max
  unsure at all n locations
agcttataaatatctaaattattatnntaaataaatatttgtttgatagattagatttaaaaatataattgtcaatgatattntatatcattntatgttaaaagagataaaaatntacatgtaaattaagatattttntatttatcaatatatntataacgaatgttctaaaattagagattgaccactcaactaaagttgattaacatagagataaaagtaagtgttatgtgtacattntttaagagccatataagaataaagtgaaattgacat

SEQ ID NO: 19344 - DNA, 337 bp, Glycine max
  unsure at all n locations
agctntncactcttatgtctgnattaagcgcataatatatcgagaanggcggaattgatcaatggaagctcttgagcaattcaaatgatcataactgttaactccgatgtccgattcacgcgcataatatatcgagacattcgaaattgaacaatggatgctcttgagaaatacaaatggtcataacttttcactctgaggtccgattcagactcatcatatatcaagaccctctaaattaaacaattggagctctcgagaaattcatatggtcataactattcactcggacgatcaattcaagcgcatcatatatagagacgcttgaatttaacaa

SEQ ID NO: 19345 - DNA, 347 bp, Glycine max
  unsure at all n locations
agctttttgcattttctaacgacaataactnttaactcggatgtgcgaataagtcccgtaatatatcgagacgctcgtaattganaactgaagctctgagcaaattcaaacgacattaacatttgactcggatgtccgattgcgtcccgtaggatatcgagacgctccanattcagaacggaagctttgagaaaaatctaacgataataacttttaactcggatgtctgatcgagccctngtatatatcaagatgctcgaaattgacaacggaagctctaagagaagtcatacgacaataacttatgacttggatgtccgattgtgtcccgtacgatatcgagatgc

SEQ ID NO: 19346 - DNA, 390 bp, Glycine max
  unsure at all n locations
ctcagctatacaattataataaaagaacaatgacaatngaatattctatacatgtttcctttgatgagtctaatgccattcttccaaggaaggattttctaaatgatatttcagattccttagaagatacacatattcatggaaatcattctaaagaaaaagacgaaggaagaaatgaggattctcaagataatggggctagaggaaataatgaacttccaagagaatgganagcctcaagagatcatcccctcgacaacattattggtgatatatcanaaggggtaacaactagacactctcttaaagatttatgcaataatatggcttttgtatctataattgaacctaaaaatataatagaagtcatagtacatgatacatggatca

SEQ ID NO: 19347 - DNA, 413 bp, Glycine max
  unsure at all n locations
agcttagctctagatgtgatggaccttntcaggttntggagaggatcaataacaatgcctataggttggacctcccagaagagtatggagtcagcaccacttttaacatttctgatttaactccttttgcaggtggagctgatattgaggaggaggaactaacagatttgaggtcaaatcctcttcaaggggaaggggatgatgcaatcctccctatgaagggaccaatcactagaaccatgagcaagaggctccaagaagattgggctagagctgctgaagaaagccttatggttctcatgaaccttatggtagatttctgagcccatgggccaaagttgggtccaattatctttgtacatattagactaggatgtcattatatttggtccttgtatatanggctccatatt

SEQ ID NO: 19348 - DNA, 352 bp, Glycine max
  unsure at all n locations
cttctttatccccatatcaattatgcagcttgtagttaacatgaatggccctcccaatattataggaatgtcattatcttcacagacatccattaccacaaagtctatcgaaaagataaaatgtttactctgaccaacacatctttaattactctgtatggtctggtaatggagcaatcaacaagtngtaaagtcatcctagtgggcatgatctccaactctcccaaccttctgcacatggagagtggcattaagttaatattggctccttggacagagtggcatttgctgtaaagctttccaagggcatggttatttccagtttcctgaaatatctaanaatcttgcaaat

SEQ ID NO: 19349 - DNA, 315 bp, Glycine max
ccgtgatgttctcgtaagagcgaacagtgaaatacaggatgaatccttgcctcctcgggtagtttgagtttgtatgagacttggcccacacgttcgattatctgaaacggcccaaagtatcttttggttagttttgggtgtattgaaccaactacggtgcgttgccggaagggacgaagcttaacgtagacccactggcctatgctgaaggtgacgtcacggcgcttggtatccgcgaatttcttcatggtgtcttgtgccttttgaaaacgatgttgtaacttccggtggatctcttgacgcgagtgtagcatg

SEQ ID NO: 19350 - DNA, 414 bp, Glycine max
  unsure at all n locations
agctnccattgttcaattntgttcgtctcgatatattatgcgcctgaatcgcacatccgagttaaaagttatgaccttttgaatatctcgagagcttccattgttcaatttcgagcgtctcaatatattatgcgcctgaatctgacctccgtgtggaaagttatgaccatttgaatttctcgacagcttccattgttcaatttcgagcgtctcgatatattatgcgcctgaatcggacctccgagtgaaaagttatgaccatttgaatttctcgagagcttccgttgttcaatttcgagggtctcgatatattatgtgcctgaatcggacatccgagtgaaaagttatgaccattttaattgctcaagagcttccattgatcaattttgtacgtctcgatatattatgcgcctg

SEQ ID NO: 19351 - DNA, 296 bp, Glycine max
  unsure at all n locations
acatttggggttgctatggcgctctataagtggattcccattaagttagtatacaagatcatcttgcttgccacaaacttcattntgggcaacaccaatcactatggcatcaagaggcccaagaccggcccaatagagctcaaactcgccacagggaaaaccccacatcctgatgttggtcaagttgcacacataaaatgtggtaacataaaggtatacacaatatggctcacattaagtgactccattgggtccttttttaccgacaaatgttagacgttagaatattagttttt

SEQ ID NO: 19352 - DNA, 419 bp, Glycine max
  unsure at all n locations
agcttgnttatgtctctnaagtttgcttctgctcaacaagggagggctttcttcgtttttggcgattcactcgtggacagtggcaacaatgatttcttggctaccactgcacgagcagatgcccctccttatggcattgacttcccaacacacagacccactggacgcttctctaacggccttaacatccccgacataatcagtatgactttgtgacatgttagaaaattagtagaatggattagtgactaaatttagtgacgaaaaattggttattcctcactaactctaaaatcactaaatttagtgacatttttaaatataaaaaaattacatataaatttttcagtcactacatttaatttttatacaagttataagaatgtttgtttggttctagtctcccatttgcatgcatg

SEQ ID NO: 19353 - DNA, 368 bp, Glycine max
  unsure at all n locations
agcttctctatatattatgcacatgatggtcataacttgtcacacggatgttcgatattggcgcatcacatatcaagacgctctgaattganaaccggaagctctcacaaaattcaaatggtcataacctgtcacacggaagtctgattcaggcgcagtatatatcgaaacatttgtaattgaaaaaagaacgcactcgagaaattcgaatggtcataactttgtcaacggatgtccgatacacgcgcataatatatcgagacgctggaaattgacatcgtatgctctcaagagattcatatggtcataacttatcacacggtagtccgattctggtgcataacatattgagactcttaaaattgaac

SEQ ID NO: 19354 - DNA, 309 bp, Glycine max
acatatactgtaatcgattactttttgttttttcagaaaacattctcaacagtcacatctttttatctgtttcttaaatggccatcaagggcttatatatatgtgacttgagacacgaatttaacaagagtttttcagaacaaaaaagtcttatcctcttataaagcaaaatcggtttatcctcttacaaattccttggccaaaacacttgtgattcaataaggaattatttgagtgctcaaattgttcaatctatctctttcaagagagatttcttcttctcttcttctttattctgaaaagggatta

SEQ ID NO: 19355 - DNA, 335 bp, Glycine max
  unsure at all n locations
agctngtgttgnattttcatggttgacgtgccgctttgaggaagaccagataagatgaaatggacgggctgtttagtttgcacggcgtgctgaaacagcgcgaggagagtctcaataggggtgtgaaagagatgcancatgagatggatgctttggagcagcagttacagatggtgttgatgaatactgatgtnttggaagggtggttgatggataatcaggggaagaagatggccggtttggagaatcccgaggatgcttttgagtgtgcggatgtgctctccaagcatatgcttgactgtactgctgctgatttggcgattgaggacacgctt

SEQ ID NO: 19356 - DNA, 292 bp, Glycine max
  unsure at all n locations
atgctctttctcggcatcatgcattactttctatgcttgaaacaaaattgattggtcttgaatgtttgaaaagcatgtatgaaaatgatgaaacttttggagaaatttttaaaattgtgaaaattcttcagaaaatggtttctttagacatgaaggctttcttttcaaagaaaaaaaattgtgtgtgcctaaatgttctactagaaatttgcttgtttgtgaagcacatgaagganggttaatggngcattntggggtccaaaagaactctagaaaattacaagaacatttt

SEQ ID NO: 19357 - DNA, 412 bp, Glycine max
  unsure at all n locations
agctttgnatggtataatgtgtangacacccctatgttggtcagagctcgaaaaaagccttaccttatgaccagaagtggtacatcaaaccacaaagaaggtcaagtttatccaagaaaagatgacgactgctcanagtatgcagaaaagttatcatgataagatgatgaatgatcttgaattcgagggtggtgatcatgtattcttgagagtcactccctggactggggtttgtcgagcattgaaatcccgaaaactaacacctcgctttattggtccatttcaaattcttaagagaagttgccctgtggcataccaaattgcattaccccgtctttttctatcttcacaatgtctatcatgntgtctcaactcataagtatatccctgatccatcccatgtgattgaatt

SEQ ID NO: 19358 - DNA, 337 bp, Glycine max
atagttaagaagacccgagtaggaatgagttgaatttatctatgaagcatgaaattagccgcagccattgaatcagtctcaatccaaagctcctttaaattaagctcccacgcatgctccaaagcagtaatgagcccccaaatctctactatcataagagaacaacaacccaatttcctggtaaactcgtttatccaatggccattaccatcacgcatcactccaccacagctagccttctcgccaacatctataacagaagcatcaacattgtacttaaaatagcccactgaggcaaccaaacaaaaagcctatccgcagaacaaggttgcccatg

SEQ ID NO: 19359 - DNA, 356 bp, Glycine max
accattgtgttgtggtgcatatacagtcgtaagctctcttcgaatgccatgttctgcacataaacatttgcatattcttgtggagcaatattcatcacctcgatctgcgcgaagagtctctatagactttactagctcattatcaacacttgctttgaagcttttaaatgtacaaaacgcttccgattcttcctgtataatataaccgccatgttttcttgaataatcatcaatgaagcatattaagtatctcttacctccattagaaaatgggtttattggaccacaaatatcagaaagcaccagctccaagacatctatagctctccatgactcttctttgcgatactgagatc

SEQ ID NO: 19360 - DNA, 366 bp, Glycine max
  unsure at all n locations
actttgattgcttattcaatggagcngacaagaataggtncagactgatcaacacatgtacagtggccaaggatgcttgngagatcctaaaaatcactcatgaaggaacctccaaagtgaagatgtccagattgcaactattggccacaaaattcgaaaatctgaagatgaaggaggaagaatgcattcatgacttccacatgaacattcttgaaattgccaatgcttgcactgccttgggagagagaatgacagatganaagctggtgaaaaagatcctcagatccttgcccaagagatttgacatgaaagtcactgcaatagaggaggcccaagacatttgcaacatgagagtagatgaactca

SEQ ID NO: 19361 - DNA, 379 bp, Glycine max
actaccggatttgtatcttggatgggtgattgtgttcttacatggagttctaagaagcaaggcattgtgacactttctacttgtgaagccgagtatgtagctgcaacttcttgcacatgtcatgccatttggctaagaagattgtcggaggaacttcagttgttgcataaggaaagcacaaagatctatgttgataatagatctgcacaagagcttgccaagaatctggtgttccatgaatgacagtagcatatagatacaaggtatcatttcattagagagtgcattacacagaaagaagtagaattgactcatgtgaaaactcaagatcaagttgcggatattatcaccaagcctctcaaatttgaagatttttgaa

SEQ ID NO: 19362 - DNA, 409 bp, Glycine max
  unsure at all n locations
agctttgaatgatgcctaaatagtggtgtgtggtgcgggagacggtttttttcctctgcctgtannngngcgttaatgattttgggttttgacttgtgagagctgttgttttgtgcctgatgagtcttgaacttatggaaatgtggagattgtgttgctgaatttatgactgtatgttgtcttttgtggtgataggaatcaacaatatgggcagcgttcttttcacaagtactggcagtaaatgacgcgacggtaaagtttgagatttgggacacatcatgacaagagatgtagcatagcttggctccgatgtattacagaggtgttactgctgctatcattgtctatgacatcactagctcggtatgatatctttgcatttggatattgttgaatacctatttaaatg

SEQ ID NO: 19363 - DNA, 420 bp, Glycine max
  unsure at all n locations
agctntgattcaattctaacgatnanntaacttttactcgggatgtcccgattgaagtcccggtatatatctgacacgcctcgaaatttgaatgttgaaagctctgagccaatttcaacaacaataactttttactcggatgtccgatttagtgacgtaatatatcgtgacgctcaaatttgaatgttgaacctctgagccaattcaaacgacaataactttgtactcggatgtctgattgaatcccgtaatatatcgagacgctcgaaattgaatgtggaacctctgagccaattcaaacggcaataactttttactcggatgtctgattgagtcccgtattatatcgagacgctcacaattgaatgtttgagctctaagccaattcatacgacaataactttctactcggatgtctga

SEQ ID NO: 19364 - DNA, 258 bp, Glycine max
ctctgagcttcaacattcaatttcaagcgtctcgatatattacaagactcaatcagacatccgagtaaaacgttattgccgtttgaattggctctgaggttcaaaattcaatttcgagcgtcgcggtatattacgggactcaatcagacatccgagtaagaagttattgtcgtttgaattggctcatagcttcaacattcaaattcgagcgtcccgatatattacggcactgaatccgacatccgagtaaaacgttat

SEQ ID NO: 19365 - DNA, 421 bp, Glycine max
tttcgagcgtctcgatgtattacgagactcttcttacatccgagtaaaaagttattgtcgtttgaatttggttagagcttcaacattgaatttcaagcgtcttgatatattacggaactcaatcagacatccaagtaaaaagttattgtcgtttgaattaggtctcagcgtcataattcaatttcgagcgtctcaatagattacgggactgaatcagacatccgagcaaaacattattgtcgtttgaattagctcagaccttcagaattcaatttcgatcgtctcgatatattacgggtctcaatcagacatctgaggaaaaaagttattgtcatttgaatatgctgagagcttcaacattcaattttgagcgtctcgatgtattacgggacttaatcagacatctgagttaaaagttatt

SEQ ID NO: 19366 - DNA, 399 bp, Glycine max
  unsure at all n locations
agctttgattatataatttcttgattnctaaaatacccatttttctctccccctttggcaacatcaaaaaggccaaagtgcgtaaaatatgaataatttaatcatacacaaagcataatttgtaaaacaaacataaaagattctaaaacatacataaagcaaaacatgaataaaaccaaattgtaatgcaaaccacttagtcatatatcacaaaccataaatatcatgttcagtcatactaagcaaatattaaaagaaatactaagtgttcaaatgtcataataatatagccaaatacacgactagaaatcaaaatactattaataatagtaatgtctaaactgatggtggtggtggaggtaaatcaatgcagtcgcgaatgatggtgacatcttcttc

SEQ ID NO: 19367 - DNA, 397 bp, Glycine max
  unsure at all n locations
agcttgatgtggaactngatctangaagccacatgtgacagagataaatacttataacttattcaagttagtgaaacttggcggtttgccaagaatcggatgtaggttatgtggttaagatgaactggtataaacatcatgtgtcttatactgattttctctttaaactaacttaaggtgtgaatttgatctttgcttttgaaaaaaactgatccaataacgctttgttagatatgaacaaatttgataaatatttataactctcagatagagtattagaacggaagacttcattagatgatgaactattgattctcagccatctctggcaatgaatgaacagttcaaaatgcttntcttgcgtattcttgataaagcagtgtgtatatacagatgt

SEQ ID NO: 19368 - DNA, 363 bp, Glycine max
  unsure at all n locations
tgtaatcgattacacatatactggaatcgattattatttcatattttcangaaatattctcaacagccacatctttatatgtggctcttgaatggctatcaaaggcctatatatatgtgacttgaaacacgaatctgctcagagtgtttcagaacagataggtcttatcctcttataaagcacaatcgttttcttctcttacaaattccttggccaaattacttgtgattcaataaagaattatttgagtgctcaaatggttcaatctatctctttcaagagagatttcttgttctcttcttcttcattctgaagagggattaagagaccgagggtctcttattgtgataggattctaaacac

SEQ ID NO: 19369 - DNA, 408 bp, Glycine max
  unsure at all n locations
agcttgatttanatcttgatgctttggtcatcctaataactcagcttgccatgaatcanaagtctacacctgctgcaagagtctgtggtctatgttcttctgcagatcaccatatagatctctgtccttctttgcaacaatctggagttaatgagcaacctgaagcttttactgcaaacatttataatagacctcctcagcagcaaaaccaacaacagcagaataattatgaactctcaagcaatagatacaatccaggttggaggaatcacccaaatctgatatggacaagtnctccacaacaacaacagcttgtccctcctttctagaatgctgctggtccaagcaagccatatgttcctcctccaatancatagcagcagtcacaacaaagacatcaagcaacta

SEQ ID NO: 19370 - DNA, 359 bp, Glycine max
  unsure at all n locations
tatattgcgganatcattttccaagcttagggcatncattnagggattttaatgcttatttttaatctgaacaatagttgtgtgggggccaaccactacaaaaaaaatactttcaacattgttattttaacatcggtttttgataaaatcgatgttaacaaatgagcggtgacatttttgtaaataaactgattttgttaaaaaaaacccaatgttaacgtgacaatattaacatccgttattaaaaaaccgatgttaacgtaacaatgttaacatcgagttttgaaaaatcaatgttaacatcgtcatgttaacatcgattttacaaaaatcgatgttgaattttaatgttgtgtttt

SEQ ID NO: 19371 - DNA, 410 bp, Glycine max
tttcttaatgtctcatgattgtcacgtcttgatgcaacaatgggtagtcatggccatacgagacattttgcctaacaaagtcaagcttgccataactcgactgtgctttttcttcaatgccatatgtagcaaagactttgatcttgtcaagttagatgagctggacaacgaggccactattatattgtgtcagttgaagatgtagttttcacctgctttcttcaacctcatgggtcacttaattgttcatctggtaagagaaatcaaatgttatgggccaattcatttgcattggatgtacccggttgagcgatacatgaagatcttaacagggtataccatgaatctacaccattcataagcatctattgtggaaaggtacatcgcaaaagaagtcattgaattatgtt

SEQ ID NO: 19372 - DNA, 407 bp, Glycine max
  unsure at all n locations
agctngtttataatctcggaatgaagaatctccatatgcctgataaagagggaggaaaacaagataattcatctaagacctggattaatacgttgtgtctaaaagtaatcaagggattgaatcagaaaccatataagccaaccacaaccttaaaaattggcattgctccaatgtaaaacctgactgcatctgcataggcctccgacttgatgcacttgcttagtctatcgggtaggtcatatatgaactactttcaacaaaggtaaaaagtatgtcaatcatattccacttccacaaaagactcagaagtcataccactaagtcaagtatggaaacataaatatttcagtgatgcaaagccggaataaagaaacatgcatgattgctttaataattaatacctgaac

SEQ ID NO: 19373 - DNA, 412 bp, Glycine max
  unsure at all n locations
agcttcatctttgattagttttattaactntgaaggcatgaataacaataatccctcttgccaggaaaatcaagatctgaaattgagatatcacanattccttgtgaaaatgaacgtatctattggtatcacatcattcctttgcctattatactagctagcttgattccttccatattttgtaagtnttttttataatttttggttttgtttttggagcagtgaccattgtgctacttcatttactgacctttatcgaagctgccccaagtgttccattgaaatctgccttaactgttgcaaagaaatacgcaatggaagtatatcaccccggtctgaactgaagtttcaatatgtgaatagaggctatgattatatgcatggtggtgatcctttaccagtgtcttgtgat

SEQ ID NO: 19374 - DNA, 336 bp, Glycine max
agcttttttttagtcatgtttgaaaaccatgcaggggttatgtttgaatttagcttcagctaagacctcattagctatcattacaccatggaggatatgtctgcctttgaggaaagcaatttgcctttcatcaattaagcgaggcagcacaagagccagcctattagccaggactttggacattattttgtagacacaccctatgagagagatgggtctataatcattaagagattgggggctattggttctggggatgagggctatgaacgatgcattacttcctttggggaatctgccattaatgaagaattcatcaaagaatatgataaaagc

SEQ ID NO: 19375 - DNA, 236 bp, Glycine max
tcataaagcccccactgctcatcttttttttgtcttgtactacagataacaaggtctgctgcatccacagaaagttcttctgcctcaatccttctcgtcatcttataagttgaattgatatcctctattgattggcgtccctgcttgacaaagtgttcaagcttgtttcttccaagtgaatgacctgtaagcaccattggtacatttaaagcacctggaagaataacagcagtatc

SEQ ID NO: 19376 - DNA, 412 bp, Glycine max
tttgcaatcttatgttgcaaatatttacaatagacctcctcaacctcagcagcaaaatcaaccatagcagaacaattatgacctctccagcaacagatataaccctggatggaggaatcaccctaacctcagatggtccagccctcagcaagagaccagagcctccattcagagcttaaccaatcagatgggacaattggctacccaattgaatcaacaacagtcccaaaattctgacaagctgccttctcaagctgtccaaaatcccaaaaatgtcagtgccatttcattgaggtcgggaaagcaatgtcaaggacctcaacccgtagcaccttcctcatctacaaatgaacctgccaaacttcactctattccagaagaaggtgatgacaaaaatttacctaacaatttc

SEQ ID NO: 19377 - DNA, 438 bp, Glycine max
  unsure at all n locations
tagaaaactaagcttggcagatctatgccagaatgcaaggggacatatatttctcttactttgacatgnatnntaagctagatgacggcgattgtgaaacaccaaatattattacatatggggctttggtggatggtttatgcaaagcgaacagggttgaagaaacccatgaattattggataccatgtcagttaatggttgtgagcccaaccaaatagtgtatgatgctcttatagatgggtnttgcaagactggaaagcttgataatgcacaagaggtgtttgtgaagatgtcatagcgtggatactgtcccaatntgtatacctacagctctctaataaatagtctatataaagaacaaaattggatcttgtttgaaagtgttgccaagatgctcgagattcttgcactccaatgtggtattacacaacatgatt

SEQ ID NO: 19378 - DNA, 448 bp, Glycine max
  unsure at all n locations
agcctttgggtgttcctcttttccttttctcangccctatcattctcacatactggatnttaagtcttattagtgtctttttctaggatactctacaaaccataaaggctataagtgcctgtctcctactggcaaaatattcatctccaaggatgtggtgttcaatgaaaccaggtttccatatactgatctgtnntctaaatccatatcctcctctaccccaacatccttgtcctcctttttagcanacattccccttgttggtcctccacttgtcactcccttaccaaacactgtacccaactccccttcccctcctcctcanacttcccaaactcatgttcttgattctggttctgacattcagtcagttcccacttctcctattcctcnaaattccaaactcctgttctgattctggtcttacactcagtcagttccacttact

SEQ ID NO: 19379 - DNA, 377 bp, Glycine max
  unsure at all n locations
cgactaatacacttgtaaaaacatagaaagttagtntatttatatgtatataccatcaattgatatattggtatatgttactcatcaacaacaacaacaacaacaacaacgccttatcccactatgtggggtcggttacatggatcaacttccgccataatgttctatcaagtaccatacttctatccaaaccattaatttcgagatcctttctgataacccctcttatattacttttgggtctatctctgcctcgaatagtctgacttctatccatctgggctactctcctcactacagattctaccggtcttctctctacatgccctaaccacctaagtctaatttccaccatcttctctacaataggcgctact

SEQ ID NO: 19380 - DNA, 196 bp, Glycine max
  unsure at all n locations
tatctctntagctattcatatggtcataacgattcactcggatgtctgattcaagcgcataatatatcgagacgctcgatattgaacaatggaagctcttgagcaaatccaatggtcataacttttaactcggaggtacgattcatgcgcataatatatcgagacgttcgaaattgacaatggaactcttgaacaa

SEQ ID NO: 19381 - DNA, 355 bp, Glycine max
  unsure at all n locations
tctgttatgaatttcgagtgtctcgatatactacgggacacaatctgacatccgagtaaaaagttattgacatttgaatntgctcatagcattcgttgtcaattacgagcgtctagatatattaaaggattcattcggacatccgagtaaaaagttattatctttttattttgctcagagcttctggtttcaatttcgagcatctcgatatattacaggactcaatcggatatccgagtcaaaagttattgtcgtttggaattgctacgagcttccgggttcaattacgagcgtctcaatatgctacgggacacaatccgacatccgagtaaaaagtattgtcgtgtgaattact

SEQ ID NO: 19382 - DNA, 412 bp, Glycine max
agcttcagaattcattttcgcgcgtctcaatagattacgggactcaatcagacatccaatcaaaacattattgtcgtttgaattagctcagagcttcagaattcaatttcgatggtctcgatatattacgggtctcaatcagacatctgagtaaaaaagttattatcgtttgaatttgctgagagcttcaacattcaatttcgagcgtctcgatgtattacgggacttaatcagacatccgagtaaaaagttatcgtcgtttgaatttggtcagagcttcaacattcagtttagagcgtctcgatatattacgggactcaatcagacatccgagtaataagttattgtcgttagaaatcctcagagcttcggattcaatttcgagcgtcttgatatattacgggactcaatc

SEQ ID NO: 19383 - DNA, 430 bp, Glycine max
  unsure at all n locations
tagcttctcacatatagtttcaacccgaggtcctctaagagacttagtgtaaatattagccaattgatcattagaaccaacaaagtgagtcttgatttcaccagacaacaccttntctcttacaaagtgacagtctatctctatgtgtttagtccgctcattgaagactgaattagaagcaacgtcaagagcggcttggttatcacanataagcttagtgacttaagtgtctccaaactgtaattgtaggagaagttgcctaagccatgtaattttgaatgcagcaacttccatggcatggcatttagcttcgatgctgggtctagcaactatattttgcttcttacttctgcatgagaacaaatttcccttcaagagtcagaggtagacctcctatctgatggtgatcctacccaatcagcatcagagt

SEQ ID NO: 19384 - DNA, 413 bp, Glycine max
  unsure at all n locations
cgaaacaagatgttgagagtgtntgacagaaatcacattctcattttgaagtcccctcttttcaaaaatagaacatttaaaattgagattgatgtgatagaacagaagtgttttaccactacagtaaacagtgaagagtggttatggcattacagatntggccatttanattttagagatctgattaagctaaactcaagagaaatggtgctgggnttgcctcagatcaagcctnctagtgaagtatgtgatggttatttacagagtaagcaatcaagaggcactttcaaacaaaatgtaccaatcagggcaaaagagaaacttganggtgattactctgatgggtgtggccctatgcanactgaatctctgggtggaaatagatactttcatatccttattgatgaattgac

SEQ ID NO: 19385 - DNA, 470 bp, Glycine max
tgccaaaattcaagtagaagagagatatgttgctcattctattactttgtaattgatctcaaaacattataatcaattacactacatatgttgaactcattgctctcaagaaacttacagatgaatcaattcgtttaacaccttagaatcatattaataatgcataaaagaagacttaacctagaacaatcatcatgttagtctataacaatcaatacaaataccacatctattaaacttgtttgacattgtaaaattattaaaccaaaactaagaccttaagacatatcttcatagttttatgctttggtccaacaataattcttcattcgaaaatatgttactactgtttatattataaatgttaagccaaaatcattaataagaccatctaaactcattatcctttttcccatacttataatatttgtgcctccaacctacttctattaaatggtagacttataata

SEQ ID NO: 19386 - DNA, 321 bp, Glycine max
  unsure at all n locations
agctntcagccatttcaaacgatcataactttntactcggatatctgattgagtcccgttatataacgagacgctcgaaattgaatattgaagctctgaactagttcaaacgacaataactttntactcggatgtctgattgagtcccgtaatatatcaagacgctcgaaattgaatgttgaccctctgagcatattcaaacgacaataacttttttctcggatgtttgattgtgtcccgtaatatatcgagacgctcgaaattgaatgttgaagctctgagccaattcaaacgacaataactttttactcggatgtctga

SEQ ID NO: 19387 - DNA, 390 bp, Glycine max
  unsure at all n locations
actcagcttaacattcaatttcgagcgtctcgatatattacgagactcaatcttacatctgagaanaacgttattgtcgtttgaatttgctcagagcttcaacattcaatttcgagcatctcgatatgttacgggactcaatcagacatccgagaaaaaagttattgtcgtttgaattagctcagaagttcaacattcaatttcgagcgtctcgatatgttacgggactcaatcatacattcgagaaaaaagttattgtcgtttgaatttgctcagaggttcaacattcaatttcgagcgtctcgatatgttacggggcttaatcagacatccgagtaaaaagttattgtcgtttgaattggctcaaagattcaacattcaatatcgagc

SEQ ID NO: 19388 - DNA, 191 bp, Glycine max
tatctctatgtgctttgttggatcatgttgaaaaggattgagtgcaatgctgatggcggacttattaacacaaaccagtccaataagagcattatattttattttgaggtcatcaagtttgatcttcatgcataacaactcactaaactcctgagccatatctctaaattctgctactgcacttgatcttg

SEQ ID NO: 19389 - DNA, 418 bp, Glycine max
agcttctgttttctttttcgagcatcttgatatatgacgggacacaatcggacatccgagcaaaaagttattgtcatttgaattttgtgagagcttctgtattcattttttagcatcaagaattattaaatgactcaatcagacatccgagtaaatagttattgtcgtttgaatttgctgacagcttctgtattcaatttcgagagtctcgaattattaaatgactcaatcggacatccgagtcataagttatcgtcgtttgaatctgctcagagcttttattttcaatttcgagcgtctcgatatattatgggactgaatcggacatccgagtaaaaagttatggtcttttgaatttgcttagagtcactggtctcaatttggtgcgtctcattatactatacgactcaatcggact

SEQ ID NO: 19390 - DNA, 410 bp, Glycine max
  unsure at all n locations
ataagcaaattcaaatgacaataactnttgactcggatgtccgattgagtcatttaataattcttgacgctagaaattgaatacagaagctctcaccaaatttaaatgacaataactntttactcagaagtctgattgtgtcccgtaatatatctagatgctcaaaattgaaaacagaagctctgagcaaattcaaacgacaatagcttttgactcggatatccgattgagtcatttaataattcgagacgctcaaaattgaatacagaagctctaagcaaattcaaatgacaataactnttgactcgaatgtccgattgagtcattntataattcgagacgctcaaaatngaatgcacgagctctcaccanatntaaatgacaataactttttactcagaagtctaatt

SEQ ID NO: 19391 - DNA, 403 bp, Glycine max
  unsure at all n locations
tgccaacccatggaagctcctaatatctcccacactntttgtggtgggccattcttggatgaccttgattntctcagggtccacttggaccccatttctaccaactacaaaccctaaggaaactatattatctacacaaaaagtacacttctctatatttgcatagagggtgtttttcctacggactgaaagaacttgcctgagatgtcctaagtgatcatctangctcctactgtacactaaaatatcatcaaagtaaacaactacaaatctacctatgaaatcccttaagacatgatgcataagcctcaaaaaggtgcttggtgcattagtgagtccaaaaggcatcactaaccattcatacaaaccaaactcggtcttgaaacgngttttcactcatcac

SEQ ID NO: 19392 - DNA, 407 bp, Glycine max
  unsure at all n locations
agcttgtagcatattcgaacgacaataactatttactctgatgtccgattgagtcccgtaatatatcgagacactcgtaattgaaaacagaagttctgagaaaattcaaacgacaataactttttattcggatgtccgattgagtatcgtaatatatcgagacgctcgtaattgaaaacaaaagcttgtagcaaattcgaacgacaataactttttactcggatgtccgattgagtcccgtaatatatcgagacgctagtaattgaaattagaagctctgagcanattcaaacgacaattacttgtgactcggatgtccgactgtgtcccgtagtatttcgagacgctcgatattgaacactgaagctctgagaaaaagcaaacgacaataacattttactctgatg

SEQ ID NO: 19393 - DNA, 428 bp, Glycine max
  unsure at all n locations
tttcttcacagtttatctntttcaaacttgagttttggaagaccaactactaagtctttcctaactagatgatataaacgatggatgttaatgtgttcaaccctacaatgccacaaccatgaatcatcatctatcttactcaccaagcaacttagctcatgaaaagatgcatgctcaacattcagcatataaatattacctattctcttaccaatgtggacaactttaccagatatggcttcacttataagatagcaatttctgtcaaactcaatcttgaaacctttatcgcatagttgactaatggttagaaagttatgctctagtgcatccatatgtagcacattctttatctgagttttgtgttaattccctatatttccttccccagtatattttgctttgttattgtctccaaacatgacata

SEQ ID NO: 19394 - DNA, 392 bp, Glycine max
tagctcgtaggcttctatttacaaccatacattggctttgaacaccatgagaaaattcacacaaaaaactgaattagtgagacatggagttacaagatttgctaccactttcttaactttgcaaagattgcataagcaaaaggccaatcttagaaggatgtttacttcagatgaatggttgaagtctatggcagctaaagagcccaaggggaagcaagcaacagatgttgttcttatgccatcattttggaatgatgttgtctatgctttataggctatggggcctcttgaagtgtgtcgatgtggtgaataatgaaaaaaacctgaatatgttcatttatgaacaatggaatggccaagagcttcaatacaatgaaagatagatatggata

SEQ ID NO: 19395 - DNA, 400 bp, Glycine max
  unsure at all n locations
ntctccactaagtngcctgatgtctgatatgtcttttctgatggtagtggtcctagatgcanggaagaatatctccaagaacaccctcttaaggtcatcccaactaaaaatagacctgcgagcaaggtagtatagccaatcttttgtcactccctccagagaatgaggaacagcctttagaaagatatgatcttcttggccatcanggggcttcatggtggaacaaacaatatcgaactccttaagatgcttatgaagatcttcacctgcaagaccatgaaactngggcagcacatgtattagtccagtcttgagaacatatggaacaccctcatcatgatattgaaagcacaagctttcataagtganatcaagtgcagccatctccctagagtcctct

SEQ ID NO: 19396 - DNA, 400 bp, Glycine max
ccttcactttcgatattgtttgattctcaactagtttatgacactgttagttcttctcaaatgcctcctttcttgtgtgtaacagataaatccaaagtttccttgtgaaatcatcaactattgacatgaagtatctaacttttccctttgattatacctttgaaggccctcacaagtcaaaatgaatgtcatccattctattcttgttggtgagcattccagtactgaatattactatgtgacacttaccatacacacagtgtcacaaaaaaggcttccaatttgtactctccaactgaccttgttgctcaattcaacataccattctactaacatgtcagcctcatatccataactttgcttggcagatattgtctcacactaaactgatcctatacat

SEQ ID NO: 19397 - DNA, 337 bp, Glycine max
  unsure at all n locations
agctttgagcatattcaagcaaatatcatctnttttactcggatgtctgattgagtcccgtaatatatcgagacgctcgaagtggaacaccgaatctctgagcatattcaaacgacaataactttgtactcggatgtcagattgagtccagaaatttgtcgagatgcttgaaattgaagaccaaagctctgagcaaattcaaacgacaataactatttactcggatgtgtgactgagtcccgtaatatatcgagacgctcggaattgattatcgaagctctgagcgaattcaaacgacaataactgttactcggatggctgatagagtcccgtacta

SEQ ID NO: 19398 - DNA, 392 bp, Glycine max
  unsure at all n locations
tctcgacatattacggggactcaatcagacattccgaataanaaagtttattngttgntngaaatnttctcatagccttcaacatttcaagttgtgagccgttttgatatnattacgataccctcaatcggacattccgagtaaaaaagttattggtcgttgaatttgttcagagcttcngcattcaagtccgagcctctcgatatactacgggactcaatcagacctccgagtaaaaggctattgtcgtttgaatatgctcaaaacttcgacattctagtccgagcgtctcgatatattacgggactcaatcagacatccgagttaaaagttattgtcgtttgaatatgcttagagcttctgtattccatttgagcgtctcgatatattac

SEQ ID NO: 19399 - DNA, 444 bp, Glycine max
  unsure at all n locations
ggcatgtttatgcttgtgggattttnntgtgatagtgaattttggccggagaaatgttgagtgaatagataaaagtaccttaccgnngatttgtattttttatgaggtgaattggtgtttttacatttggagttctatagtagcataggcatttgtgacactttttctacttgtganatgccgagtatttgtatgctgcaacttcttgcacnatgtcantgctcatttggctaagaaagattgtttggaggatacttctagttgttgcaataagggaaagcacattagatctattgttgatatatagatactgcacaaagagcttgccaaagaatcccggtgttctcatgaacgaagtaagcatatagatacaacgtatcatttcattagagagtgcattaccaagaaaagaagtagaattgactcatgtgaatactcaagatc

SEQ ID NO: 19400 - DNA, 389 bp, Glycine max
  unsure at all n locations
tatagaatatataataagagatctatgactattgaagaatctattcatgattcctttgatgagtctaatgttattcctccaagaaaggaaattctagatgatattgcagaatctttagaaaaaatgcatatttatggacaagattctaaaggaaaagggaaaggaagcaatgaagatcctccagaagaagccatatcaaattatgaacttccaagagaatggaaagcttcaagagatcatccccttgacaacattattggtgatatctcanaaggggtaacaactagacattctcttaaagatntatgcaataatatggcttttgtgtctatggttgaacctaaaaatataaatgaagccataatagatgatcattggatagttgctat

SEQ ID NO: 19401 - DNA, 443 bp, Glycine max
  unsure at all n locations
ttagagaccttaggcatgcaagctntgagttctatggccccaatgacatctatccnccacatggaaaaaggccaaggtgtttacatgacattcagaggatgtggcggaacattgacattgtccgcgtacgcttgacatttatggcattaccttacatgggcgcagcaatcgctttccatagtgagctagtaataacctgctctaaggatattcctggccataccatgcccattggcatgtgtcccanatgcacccccgtggatttccttaatcatgtagttcgcctctctggcatctatgcatcgcatgagggtcatgtcgtcgtttcgtttgtacacgatggtaccactcacatagaaactagtatccaatctccgtaacgtgcttttggcattgtcggaaatccctggtggatattctttgttctcgacatactggctaat

SEQ ID NO: 19402 - DNA, 395 bp, Glycine max
  unsure at all n locations
tctgtccctgagaaactggttcccagaagacaacaggggagtaatgaatgctgaataccctaaccttgcaacatgtccctaggaagtagacacggagatggacaagaaaatccgcagtattgtgagtagcattnttgaatagacgcctctntgtgcctgattgctgagaaaagatgttccaacatcttccaacccaagtgtttctgtgcctgatgctaagaaagatgttccaacatcctccgctccaaatgctgaagccctcccttcacccagtgaagaggaatcaacagaagaagaggatcaagcctcagaggagactcctgcaccacgggcaccagaacctgctccangtgacctcattgacctggaagaagtcgaatctgatgaagaaccca

SEQ ID NO: 19403 - DNA, 350 bp, Glycine max
  unsure at all n locations
nttatctggtggattcacttttgatcacaactgtaccatattgaatatcattagtcaccacanaaggaccaatccactttgacctcaacttaccactcgtgagtccaagcctagagttatacaataaaactttctgtccaaccacgaagtccttcttagcgatcaaactatcaaggaacttcttggtcttctccttgtagaatttggaattctcataggcttctaaacggatctcatctaactcacttagttggaacttcctttcctttccagcttgatcaatagagaagttgcaggtctttacagcccagtaagctttgtgctctatctctacaggaagatgacatgcc

SEQ ID NO: 19404 - DNA, 385 bp, Glycine max
  unsure at all n locations
agcttgtgcattcaatatcctgatgagggtgttccctatgttctcaagactggactaatacattngctgcccaagtttcatggtcttgcangtgaatatcctcataagcatcttaaggagttccatattgtttgtttcaccatgaagcccccaaatgtccaggaagatcatatctttttaaaggcttttcctcattctctagagggagtggcaaaagattggctgtattaccttgctcccaggtccattttcagctgggatgaccttcagagggtgttcttggagaaattcttccctgcatctangaccactgccatcagaaaagacatttcangcatcangcaacttagtggagagaacttgtatgagtactgngaaagattca

SEQ ID NO: 19405 - DNA, 397 bp, Glycine max
  unsure at all n locations
agcttgcatntctctcccatggctgatatcanatctatgatggtatcaaagctttgctatgctactcacattcttcctctcgattatcatatccttcattcttacatcatgagtgaacaacaacaagatcaatcactcaatgtacgcagtccttattactttcatccgggagaaaatccagggatagctntggtttctccggttcttgattcatccaattataattcatggagttgatctatgcttattgcattaagcacgaagaacaaatatgagtttgtcgatggttctattcgaagacctgcatcagatcatgaacttcatgtagctgggaagggtgcaataatatggtggcttatggttggtcatttagctctctttcattagaaaaaatact

SEQ ID NO: 19406 - DNA, 358 bp, Glycine max
  unsure at all n locations
tccattgttaaatttcgagcgtctcgatatattatatactctgaatcggacctctgagggaaaagttatgaccatttgaattgctcaagagctntcatagttcaatttctagcgtctcgatatattatgcgcctgaatcaaacctccgagttaaaagctatgaccattngaatntctcgagagcttccgttgttcaatttcgagcgtctctatatgtgatgcgcctaaatcggacatccgaagtaaaagttatatccatttgaatttctcaagagcttccgttgtcaatttaagcgtctctatattgatgcgcctaaatcggacatccgagttaaaagttatgatcatttgatattcg

SEQ ID NO: 19407 - DNA, 355 bp, Glycine max
ctattacacacatactgtaatcgattaccagaggatgttttcagagaacattctcaacagtcacatcttattatctgattcttaagtggccatcaaaggcttatatatatgtgactagagacacgaattttataagagtttttcagaacaataaggtctaatcctcttataaagaaaaatcgatttatcctcttacaaattccttggccaaaacactggtgattcaataaggaattatttgagtgctcaaattggtcaatctatctcttttaagagagattacttcttttcttcttcttcattctgaaaagggattaagagaccgatggtctcttggtgtgaaagaattctaaca

SEQ ID NO: 19408 - DNA, 458 bp, Glycine max
  unsure at all n locations
ctaagcttgccttccttacaagtcctttgctacctcgttagccactggatcttctttgattggaatctccgctgcctgcttaacaaattaaaagagaaatcagtacatgcattacagtataaaagaattttcataatgtcattcaatatcaaattataatatactaacctctgatgctatttataagaaataagttgtaatgtacactaatagattcagaggtagtatcataaatttataaatttttataataattatcttacaaatcatactaaccctaatttttaattgattgattgatactgaccatgtaaagggttttcatgatttgatccaatcacaatatgcaatanatnggttgtcttctatgataactantacaaaaatcataccaataataatttctaattgatagaatacaagtatttatagacacaacatagaagctttactcaaat

SEQ ID NO: 19409 - DNA, 326 bp, Glycine max
  unsure at all n locations
tnctgaacagattgatcagctgtttcatacagtctagtctgattgtctcctttatcatcaacatcactggccctggcattcaaattctcaatttccacctgttcttcatcttcattgactgtctccaatgagattgcttctgtcgacaaaaatggagtgtgctggtcatttttctccccagaataatcctcataattggctgcagaacctaaatggtcggaaccatgataattacttctcaaacatcttctcattcttgatgaacttttcattaaatctagcttccagaaaacctattatataatcaaatgtttagttaatcaaat

SEQ ID NO: 19410 - DNA, 412 bp, Glycine max
  unsure at all n locations
agcttcaagaattaatggcctcatcaaactacttgttccccgaaggcaattcaattaataggcctcccatttttaatggagtgggttaccactattggaaaacccgcatgcaaatcttcatagaggctatagatttaaacatttgggaagccatagaaatagggccttatattcccaccatggttgctagaaatacaacaatagaaaagcatagggaagattggagtgagaaagaaagaagactagtacaatataacttaaaagccaaaaacataattacatctgccctgngaatggatgaatactntanggtatcaaactgtaaaagtgaaaatatatgtgggataccctacaagtaacacatgaaggcacaacagatgttaaaagatctaggataaacacattaactcat

SEQ ID NO: 19411 - DNA, 391 bp, Glycine max
agcttatgttgtgatttctcatgtcctctaccatagtacaatcgaactgaagatgcgtcttatattaaatatttgaatcttttattcattgtaaacctaattccaactgaatttagattttaaaatttgatataccccccacattcatcatatattttaacatttattaaattttaaagatattgtaaccttaatcaatcttaatatgactatgtcttttaaattatacactatgatacatctcattaataaagaacatagtgcttgatgtatataaattatttgcatacttaccttttcaattctaaaagtgtggtgtctttgatctattcatatttactataataccatacaatatttacgattaataatcaaaacatctatgattaat

SEQ ID NO: 19412 - DNA, 390 bp, Glycine max
agctttaacttaatcaattcaaaagccttttgtgcttgttcattccacccaaacgcacccttcttcaaacattcggtcataggacttgctatagtgctaaaattctggataaagcgtcgataaaatgatgcaagacaaggaaagatctcacctccgaactgttgtagggctcggccaagtcttgatagcatccacttttgtttgatcaacggatactccatctttagacaccacatatccaagacacaccacactttcaaccaagaaatcacactttttcctctctccatagagttgttgtgctcttatggtctcaaatatttgtttcaaatgagtgaaatgcccctctatagatttgctatacaccaatgtgtcatcaagataaacaac

SEQ ID NO: 19413 - DNA, 404 bp, Glycine max
  unsure at all n locations
agcttgttatgccctcaagatgttcaaggagttcatagaaaagtagagtggaagcaaaatcaaagtactcaaaatagatcgtgaccaagaatacctcgcttgtacaaatttctttgagcaacctggattcaaaatcaactaaccaccaatacacacctcaatagaatggagttgttgaaaggaagaacaaaacaatcatggacatggtgaggtgcatgctgaatgccaaacaaatgcctaaggagttttgggtggaagcaattgctaccgctgtctacattttgagtaggtgcccaacanaaagtgtgtgtgataagacaccagagtaagcctggaatggaaggagaccatcaatcagacacctcagatttgttgggtgcatatcatacacacatgtttcaaac

SEQ ID NO: 19414 - DNA, 366 bp, Glycine max
  unsure at all n locations
agctcgcattctattacacaagtcttgcaattgattacctaaagatatcttcagaaaattatttccaagagtcacatctgttcaaatggtttttacatggccatcaaaggtctatttatatgtgactaggaacacacccccgctgacagtctttttaagaacacaaatgtattatttctcttataaagaaaaatcttcttatcctcttaaaaattccatggccaatacactngcaattcaataacgaattttttgagtgctcaattgctcaatctatctctttcaagagagaattcttctcctcttcatcttacttctaaaaagggattaagagaccgacggtctcttattgtatagaaatctgaa

SEQ ID NO: 19415 - DNA, 321 bp, Glycine max
atggaagctcctcatatctcccacactttgtggggtgggccattcttggatggccttgattttctcaaggtccacttggaccccatttctaccaactacaaaccctaagaacactatcttatctacacccacagtacacactctatatttgcatacagggtgttcttcctaatgactgaaagaacttgcctgagatgtcctaagtgatcatctaagctgctattgtacactaaaatatcatcaaaatacacaactacaaatctacctatgaaatcacttatgacatgatgcataaagctcatacatgagctctgtgcatta

SEQ ID NO: 19416 - DNA, 386 bp, Glycine max
  unsure at all n locations
ggctctactcttttcagaacttgcatcatcgtagcagttgccaacacagaaggtagataactcatgaacctcgaatctgcaatgttggaaaacaaaacgaaaagcaaattaaaatctaaaaacaatattatgaataagaaaactgacttgcatgaaagatgtaacaaaaatacctccaatgagggagagaagaacgccttcagacttagtgaggaactcccagaagagatgatccttcaatccaagtcttcttgtgaagtaatcaagaaaagagagagaggttggagggttcatcttccatccaagagtgganaggatcaaaatctccatctttntaatcgtcttggcttcgaacaagtatctactcttcttcacctacacaattc

SEQ ID NO: 19417 - DNA, 405 bp, Glycine max
cttcttgcaattcttcggttccttgaagatatattaacactttctttgcagctgtccagtgctctattcctggattactttgatatctctcaagcattccaaccacaaaagcaatgttaggtcttgtacacaccgcgcatacataaagcttccttaatgaaatgatatggaatgttcctcatctgctccctttcaagctcatttttaagacattgattcatattgaatctatcacctctcacaataggtgccatgtttgctgaacaatctttaatccgatatctttctagaactttatcaatataggcctcttgagacaagccaagaatcccttgagatcggtttctatggatctctatgccaatgacatatgctgcctctcccatatcattcatatcaaaattc

SEQ ID NO: 19418 - DNA, 428 bp, Glycine max
  unsure at all n locations
ntgagcaaattcaaacgacaataactntngaatcggattttcgattttgtctcatagaatatcgagacactcgtaattgaaaacggaagttctgagaaaaatcaaacgacaataagttttaactcggatgtcctattgagccctgttatatatcgagacgctagtgattgaaaacggaagctttgacaaaaatcaaacgataataatttttaactcggatgtccgattgagtcccgtaatatatcgagacgctcataattgaaaactgaagctcttagcaaattcaaacgactataaattctgactcggatgtccgactgtgtcccgtacgatatagagatgctcgtaattgacaacagaaactctgagaaacatcaaacgacaataacttttaacttggatgtccgattgaccccttaatatatcga

SEQ ID NO: 19419 - DNA, 463 bp, Glycine max
  unsure at all n locations
tgaaggcaaactggatgcgttggtcaacttggtaacctatctggccttgaatcacaaatctgtacctgtcgcaagggtttgaggtttgtgctcctctgctgaccaccatacagacctttgcccttccatgcagcaacctagagcaattgagcagcctgaagcttatgcagcacatatatacaatagacctgctcaacctcagcagcaaaatcaaccacagcagagcaattatgacctttccagcaacacatacaaccctggatggaggaattaccctaacctcagatggtccagccctcagcaacaacaacaacagcctgctccttccttccaaaatgcttctggcccaagcagaccatacattcctccaccaatccaacaacagcaacaaccccagatacagccaacaagtgagggccctccacaaccttccctcgaagaacttgtgaggcanatgactatg

SEQ ID NO: 19420 - DNA, 467 bp, Glycine max
  unsure at all n locations
tcccaagtttttaagttcttcctcanaactgtcctaatctaagttcccaaagtcctattaacaacttccgtttgcccatcggtttgtgggtgacaagtggttgaaaataacaatttagtgcccaacttgctccacaaagtcctccaaaaatggcttaagaacttagagtccctatcactaacaatgctccttggcaaaccatggagtctcacaatctccttgaaaaacaaatcagccacatgggaagcatcatcaactttcttacatggaataaaatgagccattntagaaaacctatcaacaaccacaaaaatggaatctctaccattgcttgtttttggcagccccaaaacaaaatccatggataaatcaatccaaggatacttcggaattggcaatggagtatacaatccatgaggctntaccttagactttgcctttntacatacaatgcaatgttcacaaaa

SEQ ID NO: 19421 - DNA, 444 bp, Glycine max
  unsure at all n locations
acatactgtgtaatattattagtaagaaacatagccttctatatttgataactaaaccttcttctccttttgcattcgtatacggcatgaaatatgttactcctggaaagtccccaccttctacttcggccaatccaccatacacaacatcaccccacccaaaatcgacttttccaaaatgataatatatatctcaagtctgacacaacatataacaccttacagttgcgaataagcatcgatccttaatcaccattagatctgccacagaatgcatatactcctccgtcacctaactnttcactaggttgattccactgcatacccaaatggatttgcacaaagctatcctgcagcggtgactgctgcacggtatggaacagcattgccgtaataacctacgggtaactgatgatagaaccgtgcacgtgcatcgactatgca

SEQ ID NO: 19422 - DNA, 382 bp, Glycine max
  unsure at all n locations
ttcttcttttgtttcgtcttcctgcagctcgctgatattttcacgaagcctctatctccagctctctttcaaggtctctgttccaagctgggaatgatgaacatccattcctagcttgcggngggctctcaacaatagcttgttagttagaaaaagctgttagagttagttttctttctggtgtaactaactaaccaccctttttctctttccttcatatgtgtataaatatcttacgaattcagtaataaagacatgcaattatttggtcatctcacgtacacttgcgtcgtttctctctcctttatggctgttgatccatttaatatttgttccgtgctttcccctggacgacgttntcgagtagagaaatgatgcattt

SEQ ID NO: 19423 - DNA, 473 bp, Glycine max
  unsure at all n locations
ntgaagcactcacattgngttgaagcaatggaagaagatctaatgtctattgagagaaacaagacatggagtctcacaaagctaccaacaggaaagaaagccatagcagtaaaatgggtctacaaaactaagttgaatcctagaggagaagtaacaaagttcatagccagactggttgcaaagggatttctgcagaagcaaggtctggattatgatgaagtatttgcccctgttgctangttggaaacagttagacttgtaatagcaatggctagctacaattgctgggaagtacaccaaatggatgtaaaatctgcatttcttaatggctcactagaagaagaagttnttgtcactcaaccaccagggtttgtgatgaaaggtagagaaacagaggtgtacaagctgcataaggccttgtatggtctgaaacaggcttccagagcttggaacaagagaatagatacctttct

SEQ ID NO: 19424 - DNA, 433 bp, Glycine max
  unsure at all n locations
agctntaagttaattcaaatgacaataacttttgactcggatgtccgattgagtcatttaataattcttgacgctagaaattgaatacagaagctctcaccanatttaaatgacaataactttttactcagaagtctgattgtgtcccgtaatatatctagatgctcaaaattgaaaacagaagctctgagcaaattcaaacgacaatagcttttgactcggatatccgattgagtcatttaataattcgagacgctcanaattgaatacagaagctctaagcanattcaaatgacaataactnttgactcgaatgtccgattgagtcattntataattcgagacgctcaanattgaatgcaggagctctcaccannattaaatgacaataactntntactcagaagtctaatggtgtcctgtaatntatcta

SEQ ID NO: 19425 - DNA, 397 bp, Glycine max
ggacctataaaactcaactatggaacttgctcttaacacaagtctgttgttctttgactgctgacagctagagacttttctttcttacgtgcttcgacttgttaaagttcatgttcatgaacttaacagtaccaattaattctttaaaggaaattgagtcaagattctttaaaacccttagtgttgttacttgttaatgtggctccttgtagagcttgtaagccttggatcttcttcatcaatgaagtccttcgcttcttgaagatcaatggccgcggaatggagaataaggaaaggttattggagatgccactttaacgagaagatgagtctcgaacaagctcaccaccataggaagtcatgcataagagcttgaaggtaggagaagatgggtgga

SEQ ID NO: 19426 - DNA, 456 bp, Glycine max
tcttagtttcagatgatgcagatgggcttgtagctacctcatgcactcctctaatgactatggcatcatttctggcgctaaactgttgggagttggaagccatcttctcaattaaatttctggcttcagcaggagtcatgtctccaagggctccaccactggcagcatctatcatacttctctccatattgctgagtccttcataaaaatattggagaagaagctgctctgaaatctgatggtgggggcaactggcacatagtttcttaaatctctcctagtactcatacaggctctctccactaagttgtctaatacctgagatatccttcctgatggctgtggtcctggaagcagggaaaattgtttctaagaatactctcttaaggtcatcccagctcgtgatggaccttggagcaaggtaatacaaccagtcctttgccactccctctaatg

SEQ ID NO: 19427 - DNA, 407 bp, Glycine max
agcttaatggtgcaatcccaatcgaaattggccaacttcataagttgtcaatactgaatttgagctggaattctctgggtggatcaattccatttgagattacaaagttgagcaatattactttcctgaacttgcaaaccaacaatctaagtggttccataccaacatccattgacaacttgaaatttctctttgaactccaactcagggaaaacaaactaagtggtgtgataccaagcatgccggggagtttgcaggtgtcactgaatcttagtagcaaccactttagtggtaatactcccaacaattttggtaatttggatagcctgcaagtcttggatctctcaaataacaaatttcctggtccaattcccaaccaactaactggaatgtcagctctgacatag

SEQ ID NO: 19428 - DNA, 475 bp, Glycine max
  unsure at all n locations
ctaagcttacatcaaccacttcgggtactgacctacttttatggtcttgatggggcctatgcaagttgaaagccttggaggaaagaggtatgcctatgttgttgtggatgatttctccagatttacctgngtcaactttatcagagaaaaatcagacacctttgaagtattcaaagagttgagtctaagacttcaaagagaaaaagactgtgtcatcaagagaattacgagtgatcatggcagagagtttgaaaacagcaagtttactgaattctgcacatctgaaggcatcactcatgagttctctgcagccattacaccacaacaaaatggcatagttganaggaacaacaggactctgcaagacgctgctanggtcatgcttcatgccaaagaacttccctataatctctgggctgaagccatgaacacagcatgctacatccacaacagagtcacacttagaagagggact

SEQ ID NO: 19429 - DNA, 446 bp, Glycine max
  unsure at all n locations
tncatcaatttatctcttatttcagcctctgttgaagtgtcatcttcattcaccaatctggataggtggtccgctaccacaatttcagaacctttcttgcccttgatgactaaatcaaattcttgaagcagcagtatccatctgatcaatcgtggcttggaatcaactttgcataacaaatattttattgctgcgtgatcagagtaaatcactatctttgatcccaccagataagatcaaaatttctcaagtgcaaacacaattgtcagtaattctttctcaatggtggcatagttaatctgagcatcattcaaaactctgctagcgtaatagatgcgatgaaacattctgctcttctgctgccccagcacagcacctactgcataatcagttgcatcacacatcaattcaaactcttgtcgctagtctggtgctgtaatcacaag

SEQ ID NO: 19430 - DNA, 329 bp, Glycine max
ttcttatcttgatcatcttaactcgatgtatggcaagtctccatgtggggttagctgaaacatggatgctatggtggcaagcacattacccatctgattttcctctctacgaatgtggtggaaagagacctcatcaagaactcaatcagtttcttgatgtacgcctgatagggtatcaactagagatccctagtttcccattctcccctcagctggcgaattaccaaggctgagtctctgtacactataagcaatatgacattaaagtcaattgccacttggattccgacggcacatgcctcatactcagccatagtattcgtgcaatc

SEQ ID NO: 19431 - DNA, 393 bp, Glycine max
  unsure at all n locations
tctangcgatggctctgtaagaactccactaccctagttagacgtgtgtttcatcagnccaagcatgactactgcctattcaccattagatcatggaataacttagtcattctactaatgcatatcgatgacatgatcctgtcaggaccaaattctagactagggcaagctagtgagacccaattcaatctatgtctcaattgaggatccttggcactatgaaatattatcttggcttataattatctaaatgcaacagaggtatctcactttcctagagaatatacactctatctcttttggaagatacatgtttattgacatgcaaaccgatcaatctatcgatggatcccagactagatacttactgcctgataaatcaatcttgatgat

SEQ ID NO: 19432 - DNA, 455 bp, Glycine max
  unsure at all n locations
tggtcataacgtttcactcggatgtcggattcaagcgcataatatatcgagacgctcgaaattgaacaatggaagctctcgagcaattccaatggtcataacttttaactcggaggtccgattcaggcgcataatatctcgagacgttcgaaattgaacaatggaagctctcgagcaattcaaatggtcataacttttcactcggaggtccgattcaggcacataatatatcgagacgctcgaaattgaacaatggaagctcttgagcaattcanatggtcataactnttcactcggaggtcngattcangcgcataatatatcgagacgctcgaaattgaacaatggaagctctttagcaattcaaatggtcataacttttcactcggatgtccgattcacgcacataatatatcgagacgctggcaattgaacaacggaacgtctcgagaaat

SEQ ID NO: 19433 - DNA, 475 bp, Glycine max
  unsure at all n locations
tagctacacgcaccctatntaaggatagcctatctatatatataatatatatctgaacatttattacaaaaataagggtaaattataaaagataaagaaagatgacaattacaaataattttttcataacatataatgtattatttggcatagcttaacttgaaaatagatctattaagacaatgaataaaataataaaactgtcaagttgtcaactgattaaagaatagtatattacgttacagtaaaaaaatagtatagtatagtagtagctttcaagtttttaactaaaatattatattttaataattaatataaacgtattaagtgagtaaattgtcacgcgtatgtttgtacataataatatatattacaaatacatgtgtaccagacgctcttagctggcatattgatttaatattgcatcatcacaagcatagagcataaactagcattatggttctctagatgatgt

SEQ ID NO: 19434 - DNA, 293 bp, Glycine max
ctgaagcatccattatccctagctatcctggatggttgcaaatactgccctaagtactagcgaaacaagaagactgacagggtaacgaagtaccacgtctctcaagagaaataacaagcgttgaagactaaactataaataaaaacattatttcattgtacaaagcatacctttcttggccttctggctaagatcaagtgtagcatctgttcttatcagttgaatatttgatatgtggaccattggctcacacgatattaaattaatcttttgagggggagggtccattatag

SEQ ID NO: 19435 - DNA, 451 bp, Glycine max
  unsure at all n locations
atcttcatgtttaactatgtatggcaaaacttcattactggtgttcaagatatacaagtgagcttgtaacaaatcttctacacttggagtgatcacctgcagtcctcttgaacccttaccacccactctgtcatcatgccgagactcangaagcccaacaggtttagccttctctaagtattctgaacaaaattcaatggcttcttctgcaatgtacctctcaacaatagatgcttctggatgatatagattctttgtataccctnttaagatcttcatgtatcgctcaaccgggtacatccaccgtagataaacaggaccacaacatttgatttctctgaccagatgcacaatcaagtgaatcatgatgtcaaagaaagcagagggaanatacatctncaactgngcacagttaattgcggcctcattntccaactcatcanacatgact

SEQ ID NO: 19436 - DNA, 435 bp, Glycine max
  unsure at all n locations
agcttagattgacaacaacttttgcaccttcaaatggtctcctttttacctggaattgaagtgaaatttacattaaattcatatggaaagcttctattgagaaaatataaaaactaaacaagaaatatttacaatcctaccaaaaagaaccataaattgggagaaatatatacatttttgaaaacttttctatacaaaagttagtcataaaagacgactaacagtaaggcaatgaaatgggaggaggcttgctatatacaatttcatagggagtagcatangcagaagtatggaaggtggagttgtaccaccatttagctaaagagagctaatgaacccaatgatgaggtctatctaaacacatacaccgaagataagtctccaaacgcctcttaacatcctaagtctgcccatctgtttgtgggtgataagagg

SEQ ID NO: 19437 - DNA, 404 bp, Glycine max
  unsure at all n locations
tgcaatcgattacacatatactgcaatcgattaccatatcatatcttcagacaatatcctcaacagtcacatgtttttatgtggttcttcgaatgactatcaaaggcctatatatatgtgactcgagacatgaatctgctaacagttcttcagaacacaaacgtcttatcctcttataaagcacaatcgtcttattgctcttacaacattccttggccaaattacttgtgatccaataacgaattttttagcgctcaaattgttcaatctatctctttccagagagatttcttcttctcttcttcattctgaaaagggattaagagacccagggtctcttgttgcgaaagaattctaaacacanatgaagggttgccttatgtgtctacaacttgcaaacgaat

SEQ ID NO: 19438 - DNA, 417 bp, Glycine max
tcttaaagagtaagagacactctttatcattctctctttgtcaaatgtacttgccgactaagatgtttgtaccataactcatacattgacaatgtttatatttattttattttactaatcacatttacaacagaatgccttgaattgaaatttgatatatagaataaaaacattctttaataatagaattttaattcaataaaatgtattttggaaatgatatcattacataagactaaaattagttaaaatttatttatattttaatctatattgagatcgtttatctttgctctggaaggagtcctatggaaggaagatatagaaacgaatttactttgagattgaagaaatgttgattgtgatttgatgctagtagatattagttcactgatgtctagattctattctaagtga

SEQ ID NO: 19439 - DNA, 436 bp, Glycine max
  unsure at all n locations
agcttgccgtcacggagttntccgactatgctcttgtgtggtggaacaagctaaaaaaggagagagcaagaaatgaagagccaatggttgatacatgggcggagatgaaaatgatcatgaggaagcggctagttactcaagggatttgaaatttaagcttcaaaaactaaccacccaaggcaacaatggggttgaggagtatttcaaggaaatggatgtgctcatgattcaagcaaagattgaagaagatgaggaggtaactatggctcgatttcttaatggtttgactaatgatatccgtgatattgttgagctgttggagtttgttgaaatgaatgatttgcttcacaaagcaatccaagtataacaacaattaanaagganaggagtggctaagaggaagtttaccaactttggttcttctagttggaaagac

SEQ ID NO: 19440 - DNA, 419 bp, Glycine max
  unsure at all n locations
ttcttgtttaccccatgttgagtttgcttacaataaagctgttcatagcactactaattgttctccttttgaagttgtttatgtttttaacccactaacttctcttgatcttttgcctatgcctaatgtttctatttttaagcatanagaaggtcaagtaaaggcggtctatgtgaagaagcttcatgagagagtcaaagatcaaattgacaggaaaaataaaagctatgctaaacaagccaacaaagggagaaagaaggttgtcttcgaacctggagattgngtttgggtgcacatgaganaagaaaggtttatggaacanagganatcatagcttcaaccaaggggagaatggaccatttaagtgcttgaaagaatcaatgacaatgcttacaaagttgagctacccagtgagtata

SEQ ID NO: 19441 - DNA, 469 bp, Glycine max
  unsure at all n locations
gtgtntgctccgtgcccctatttaagggacctaanaggtatagagctaactangcatttagtgataacccccaaggtagtcatatctctcttgatggtctctagaggtatcatcccctttgaagaacatattgcagtagtagggactactagcaacaataagttttcaaagagaaaagctctagatgagggttcactgtaatcaagcaagtcggagacctagcatgatcacagattcacctccgctccttatgttcccatgaacccgggtatagggcactntttccactcacagtgtgtgcaaatagtgttggtgtttgtgtgcatcanatgaataaatatttacctcatgcatacattntanaacgcactataagcaacaaagagtttatacacacaagcacataagacaaataaagggaaaccaacaaaggagaaagtcacgataaaacattgcacaagaattaaat

SEQ ID NO: 19442 - DNA, 455 bp, Glycine max
  unsure at all n locations
tcacaacgtaaggaattgtcccagtggcaaactgtcgatatcacctgccctgtctccgtatcccaatacttaatattcttgtcatacccagcactcaaaaacttggtcccatcattgctgaaacagatatccctaacggctntcgagtgtcccatgtaagtcctcatacacttgccagagttgaaaacatcccacatcttaatcttggtatccatgccagcagagagaatcaaatggccatacttggggaacaacctaatagcagacacccctttggtgtgtccactccaagtatgaatcaatctctcgggcatataacaatgatcattactcgcctttgcatccttgngaggcgcgatccaagacctaccttggtaatccttctcctctttcccatgaaaaagtgctttatctttaacaacctcaactnttctccctccanaaccactcttctc

SEQ ID NO: 19443 - DNA, 448 bp, Glycine max
  unsure at all n locations
cagcatccaacttcgcatgagcaccgcctatcactctanaatcgatagattgatggagttcctcaacagtacgttggaacaatatctccatgcctttgtgcattccaacccgtcgagatggggaaaattcctcacgttacagaatggtcttataacaccgctgttcattctgccacaggactgtcaccttatcaaacagtttatggtaaacctcgtccatccattccccattatttgcttgggtcctctactattgaggctgttgaccaattgctttcagagtgacaagctatgttgcaagctctccataagaagcttttcaaagctcanactgctgtgaaggtgcaagctgacaaaaaacgcatggaagtgtcctatagtattggtgattgggtttatattcgttttttcccctaccatcaaacgtcagtttccaggatgacatata

SEQ ID NO: 19444 - DNA, 493 bp, Glycine max
  unsure at all n locations
gctctttctcctaagatttaatcggattatttttttgaatctactctgaaaagctctaaacctcatgacaatggaggatatacatggagaataagatcaagaacaaggaattaaagtgaattgaccgaacaaaaagatagaggcagaaaaagaacatcacatagacaaagatgctcttgataccatatgatgtagctccatgtggagcttgtaggccttggatcttcttcatcaattgagtcctttgcttcttgaagattaatggcagcagaatggagaaggaagaaagatgattggagatgccacttcaaggagaagatgagtcaagaacaagctcaccaccatangaagccatggataaaagcatgaaggtaggagaagatgagtggagagagaatgagagaagaagcacgacatcttgtgcctcacatgaggtctgaactntgaaatgtaattctcacatgatcaaagttggaacaatgcacacacaacg

SEQ ID NO: 19445 - DNA, 359 bp, Glycine max
  unsure at all n locations
atacaatccaagttggaggaatcatccaaatctgagatgggcaagtcctctacacaacaacagcctgtcccttccttctagaatgctgctggtccaagcaagccatatgttcctcctccaatgcagcaacagcagcaatcacaacaaagacaacaaacacctgaggccccttctcaaccttccttananganntagtaaggcaaatgaccatccagaatatgcaattctagcaagagacaataacctccattcagagtctgaanaatcacatggggcagatggctactcanttgaaccaagctcactccccaaattntgacaaattgccttcacagactatgcagaaatcgaaaatgtg

SEQ ID NO: 19446 - DNA, 368 bp, Glycine max
  unsure at all n locations
cccatctgacctactagcccaattaacatcgacactacccgttgaaaggatatnaggtgatacaccaaagcttccaaacatggaagcaaccatgagaggtgtcctctcttcataacctatnttcttcgaggcaacacaccttccataccaaaaccctaccccatcaatatcatgaccctccttttcaaccgcatctgtgaaactaaccagatcatctgctgcaaaaaactcaagcaaagctgaaattatatgatgcatcccttcttttgcatactcctccatgaccaaaccaaattgagaatgtctcccttggaacaccgacatggagaaataaatattccttaaaactcggcagatctgacaatcac

SEQ ID NO: 19447 - DNA, 469 bp, Glycine max
  unsure at all n locations
tgctgcanacatctacaacagacctcctcaacctcatcaacaaaatcagccacaacataataattatgacctctccagcaacaggtacaatcccggatggaggaatcatcccaaccttagatggtcgaatccttcacaacagcagcaacaacaacaaccttattttcaaaatgctgctggcccaagaacaccatacgttcctccaccaatccagcaacaacaaaaacagcaacagccccagaaacaaaaaacaattgaggcccctccgcaaccttcccttgaagatcttgtgaggcaaatgactatgcaaaacatgcagtttccacaagagaccagagcctncattcagagcttaactaatcagatgggacagttggctacacagttaaatcaacaacagtcctagaattctgatagaataccttctcaatctgtccaaaatcacanaaatgtgagtgcgaatacattg

SEQ ID NO: 19448 - DNA, 478 bp, Glycine max
  unsure at all n locations
gcttgccatgttaaaggagaaagcatcacatccttttaaggctgannttattcagttctttctcttcatttatgtgcttaagcaacggaagctgaaccaatatacctgcggatattaacaaaccaagcctcacaataaaaaaaaaggcccaaaacaaaaaagtgtaatcgatattaaaaataacacatgcatgaattgaaaaagcatgtgttcaggcatgtaaagtaattgaggcacaaaaatgtgaagttaattgataagtatgatgaaaatcgaaaagagtgtaataagtgacgaaccatgtacatcanggttaacattcaactcgtgaacttgttttattagttcagcttgcgagacttgttcgggaaggtccacatcgaaggatttgattcccaattcggcgcatgcctttctcttcattcccacgtagctntgtgaatcctttctgttccctactatcacaactgctagtccc

SEQ ID NO: 19449 - DNA, 459 bp, Glycine max
  unsure at all n locations
ntcactacagctgtctatcttattaatagactttcgttgtcttctcttaattntgaaactccttactttgtcttacatggcacacaccctaactattcatcgctatgtatctttggttctaaatgttttccttacacttgggatgcacgacataacaaattcgaccctaaaacccttccttgtgtgtttgttggatatagtgatatacataaaggatataaatactttcatccttctagtaagaaattttttatctcatgacatgttgtttttgacgagtcattctttcaatataaaactaattgtcatcatacaatttcctctcctacacagcatgtagttagcataattgattcttggctacctcatactaactccagttcttgtgcagacctaacaacaataacaacagctnntgcttccgttcaccatgctcaaatctttaatgaatctcttgct

SEQ ID NO: 19450 - DNA, 475 bp, Glycine max
  unsure at all n locations
tttgaaagcatgtaatcgatacacatgtcttgtaatcgatttccagtgttttggaatgttttacaacaaccataaaaaatttgaatttaaatttcaaagttatgtaatcgattactagtgtttaaatattcaaatttcaaatgcgaagagtcataactcttcagaagtaactatgtaatcgattacaccattatggtaatcgattactagtaaggattttcgaaaataattcccaatagtcacatcttttcatttaaattttgaatggccatcaaaggcatatatatatgtgacttgngcacgaaattntcttagttntacttgctcaaaaagtcttatcctctcaaaagattcaaagtgtcttatcatctaaaattccttggccaaaacatttgtgattcaataaggaattatttgagtgcttcattgtacaatctatctctntcaagagagatntcttcttctcttcttctta

SEQ ID NO: 19451 - DNA, 391 bp, Glycine max
  unsure at all n locations
tctatagaaggttcattcctaatttctctacaattgcttcacctcttaatgagctggtgaagaagaatgtggcatttaccttgggtgaaaaacaagagcaagcctttgctttgctcaaagaaaagcttactaaggcacctgttctagctcttccttgagtttctaaaacttttgaactagaatgtgatgcctctggagttggagttggagttgtattgtaacaaggtggacaccctattacttattttagtgaaaaacttcatggtgccaccctcaaccaccccacatatgataaaatgctttatgccttaataagagccatccaaacttgggaacattacctttgttccaaggaattntgtattcatagtgatcatcaatcacttaagta

SEQ ID NO: 19452 - DNA, 491 bp, Glycine max
  unsure at all n locations
tcaagcttagctacacaccaccctctcataactaagctcacctttttgagaagccnccttatgaagattcctaaagtagcttgagcttagctacacatacctctctaatagctaagctcacctccttgagatgagaagctagagcttagctacacaccccctataatagctaagctcacccccatgacaaanaacatgaaaatacaaaaaaaagtccttactacaaagactacttaaaatgccccgaaatacaaggctaaaaccctatactactagaatggccaaaatacaaggcccanacgaaggaaatacctattctaatatttacaaagataagcgggctcatacttagcccataggctcgaaatctaccctaaggctcatgagaaccctaggaccttcccttggatctctagcccaatctacttggagtcttctacccaatgcccttgcggagtaggattgcatcactctctttcgtagcttctatg

SEQ ID NO: 19453 - DNA, 476 bp, Glycine max
  unsure at all n locations
agcttctaaactntgtacaagaatgaagctctgataccacttgttagacaagtggtctcagatatcttaagaaggcgggggttgaattaagatattcgaaactatgtcttctaattaaaaatctatcttactttctacttaagttatgaattcccttagagacaatcttcttaaatattaattcaaatgaagcaacttgaatatgaatataaagcaataataaataaaggagattaagggaagagaaaatgcaaactcagttgtatactggttcggccacacccttgtgcctacgtccagtccccaagcaacccgcttgagagttccactaacttgtaaattccttttacaagttctaaacacacaagggacaacccttctttgtgttagagatttctacaacaagagactcacagtctcttaatcccttagagaatgagaagaagaagaggaacaaatctctcttgaaagagatg

SEQ ID NO: 19454 - DNA, 490 bp, Glycine max
  unsure at all n locations
tgaccaattcanatgaacgaggaactccttcaatactgttaaaaggaaattcttgatttgcttgataaaggtttaatccggaaaagcaaaagcccgtggtcctgtgcggctttttatgtcaacaaacattctgagcttgagcgtggaacaccccgtttagtcataaattacaaaccactgaaccaagcattacaatgaattatgtaccctattccaagcaaaaaggatttacttaacagattaaattctgcaaagatattttctaaatttgacatgaaatctggattttggcaatccaaatccaagagtcagataggtacaaaacagtgtttattgtacttttcgggcaatacgaatggaatgtgatgccattcggactaaagaatgccccttcagagtttcanacaattatgaatgatatttntaatccctattcacaatttgtcattgtctacatagatgatgtgttaatcttttcccacaacattga

SEQ ID NO: 19455 - DNA, 460 bp, Glycine max
  unsure at all n locations
actaagctttagcccttanacgaaatttcatttactcggatgttgattgattccataatatatcgagacgctcgaaattgaatgttgatgctctgagcaaattcaaacgacaataaatctttactcggatgtctgattcagtcccgtcacatatctagatgctcgaaattgaatgttgatgctctgagaaaattcaaacgacaatatctttttactcgcatgtctgattcagtcccatcacatatcgagatgctcgaaattgaatgttgaagctctcagccaattcaaacgacaataactttctaatcggatgtctgattgagttccgtaatatatcaagacgctcgaaattgaatgttgatgctctgagcanattcaaacgacaataacatcttactcggatgattgattgagtcccgtattatatcgagacgctcgacnatgaatgttgatgctctga

SEQ ID NO: 19456 - DNA, 472 bp, Glycine max
  unsure at all n locations
tgatcaacccactntgttatgacatcgatgcagggtttccagtcatgtttgaggttggttacattggcatggagagcctcttgaacatcttttctattaagatatgcgtacacataattctcactacatggatcagtcacaatctgcaaaacaaataaacatggcttcaattctagtgaagttcatgcttcatgcaatgttgagttttctaaaatctattaggccagccaaatatttgaagcttactgtgttccttttgggcagggctgtgagatttgcattcttgcatagtggagcataaatattgtataaatcaatgtattcaatatcctccccaagttcatctccggctgcatcgcacacactntcctgaatctttgatgatgatgaatcacaagctntgttgagataagctgctntgtctgagatgattgcatggctggcaagataatcatacagtccgtccgagtca

SEQ ID NO: 19457 - DNA, 454 bp, Glycine max
  unsure at all n locations
ntgatggtgttgagaagaaatcacatgtttgtcatcatcaaaaagggggattttgtgaatgtatgtatacatgattntgatgatgtcaaaagaagaatcaaacaaggctcattntgcttcaagattaatacaagattgtttcaacaaacaaagccttgattcaagatttcttcaagatcaagccttgcctcacaatgaaaggtttcaagtcattcaaggcacatgtaatcgattaccaatacatgtaatcgattaccaatggtttgaaagtgtgtaatcgattacacatcatatgtaatcgattaccagagactctgaacattgngaattcaaattntaaatgaagggtcacaactgttcaagaaaaacaattgtgtaatcgattacactaattctgtaatcgattaccagagaggattntcaaggaatatcgtcaacagtcacatcttatcat

SEQ ID NO: 19458 - DNA, 442 bp, Glycine max
  unsure at all n locations
tgatgactatggtgtgttgtgggacttctccaccaatgtagatctttaattnttggcccttacctaactagccacgatctttggattggtcttctatctttatagctccatagggcttaacgtctttaatagtaagggggccactccttctcaattgtaattntcgagaaacaactttaatcttgagttgtagagcaatacttgttgtccaggcctaaattctttgaggaggatatttttttcataatacctcttggttctttctttgtagagcttggatgattcgtatgccttgagtcaaagttgagaaacttcatggctcaatgagcttttatttctaataccactggtaggtggcattctttnttgtacaccatttgaaatanggaaaggccaatgggtgttttgaaggttgttctatatgctcaaaggcaatcatcaa

SEQ ID NO: 19459 - DNA, 473 bp, Glycine max
  unsure at all n locations
gggatattntnntgaaaatggttatacaaaaacgatttgttntantaagagatgaaagtcaatttanaaaaaaacagaattaaaaacactattaatccttaaaatttcaatttgataagcaaatttattgtctgaacaagtttgaattaacattttctatttgaaaacttatactcaaaatattcttactgagattttgaaaatataaatttatttataatgttataaaaaaaattaaaattgatctatcaaatgtaattatgagatgattttcctatattttaaattaatataatattcatgcacactntttattgagtatatgtataaagtaattgacaatctatgacaatgtgatctttnttacattgtttgtgtattttaattaaatntacatatgtaatataattaaacattctacaataatntataataataaatacttaagaatgcattaatactaattaagttag

SEQ ID NO: 19460 - DNA, 375 bp, Glycine max
  unsure at all n locations
tatgactcggtcaattgagaattcttgatttacatgtttggaagattgagattcaatgagatatgggtcaaatggattaaggggtgcttgatgtctactanggtatcaatctttgttaatggaagcccaatgttggaatttatggtatcaaaaggattgagacaaggagatcctttagatcccttcttgttcaatgtggttgtggaaggcttatgtgggttgatgaggaaagcattagacaaaaaattagattctagtttcaatgtggggaacaaaggagtgaagataaatatccttcaataggaggacaacacaatcttcatgggagaggctaccttggataatgtcctaaccatcaaaagcattctntgatgc

SEQ ID NO: 19461 - DNA, 462 bp, Glycine max
  unsure at all n locations
tgctaacccatggaagctcctaatatctcttacactttttcgggtgggccattcttggatggccttgattttctcatttctaccaactacaaaacctaagaaaactatattatctacacaaaaggtacacttctctatatttgcatagagggtgtttttcctaaggactgaaagaacttgcctgagatgtcctaagtgatcatctangctcctactgtacactaaaatatcatcaaaataaacaactacaaatctaccttagatcccttaagacatggtgcataagcctcataaaggtgcttggtgcattagtgagcccaaaaggcatccctagccattcatacaaaccanacttggtcttgaaagcggntntctactcatcaccctttttcatcctgatttggtgataaccacttttaagatcaatttttgaaaagatatntgcaccatgcaacccatcaa

SEQ ID NO: 19462 - DNA, 478 bp, Glycine max
  unsure at all n locations
attcttttgacattgttcaagttcctcttgcatggctgatgtttcctctatggaggggacgcatcactagaaacacggctaggagactcttgaaagattagactagggatgcagaagaaggccttagggttctcatgagccttaggatagattctgggcccatggactaagtatgagcctacttatctttgtacaaattagattatggggtattgctaggggcacccagcaacattactggtgcacccaacaattntttagaattcccaaaatacccatcaccgtatttttttctacaaaaagttggtttatttcattnttgtttacattgttgctttctttgtttctccatggtagtgctgtgcggtatttggagctttgagagagtttanggtgttgttcgcaatcggcaagtgtaccagatcgcacaagtagtataaaatggtaagaatcgagtatcgaactctcggngaacttg

SEQ ID NO: 19463 - DNA, 477 bp, Glycine max
  unsure at all n locations
tcctcttgaacccttaccacccactctgtcatcatgccgatacttaagaaggccaacaggtttagccttctcaatgtattctgaacaaaattcaatggcttcttctgcaatgtacctctcaacaatagatgcttctggatgatatagattctttgtatacccttttaagatcttcatgtatcgctcanacgggtacatccaccgcanataaacaggaccacaacatttgatttgtgtgaccagatgcataatcaagtgaatcatgatgtcaaagaaagcagggggaaaatacatctctaactggcacagtataattgcggcctcattntccaactcatcaaacttgacaggatcaacgactntgctacatatggcatggaagaaaaagcacaggcgagttatggctaacctgacttttgttggcaagatgtctcgtataaccacggctaacaattggtgcatgagcatgtggtaatc

SEQ ID NO: 19464 - DNA, 451 bp, Glycine max
  unsure at all n locations
tganattgacaacggaagctgtcgaganattcanatgttcataactntngtcaagaaggtcagattcaggcacataatatatcgagacgctngaaattaaataacggaagctgtcgagaaattcaaatgctcattacttttcactcggaggtccgagtcaggcgcataatatatcgagatgctcgaaattgaacaacggaagctctcgagaaattcaaatggtcataacttttgacacggaggtcagcttcaggcgcataatatattgagacgctcgaaattgaacaacagaagctctcgagaaattcaaatggtcataacttttgacccgaaagtcagattcaggcgcataatatatcgagacgctcgaaattgagcaacggaagctctcgagaaattcacatagccataactnttcactcggatgtcagattcaagcgcataatatatc

SEQ ID NO: 19465 - DNA, 444 bp, Glycine max
  unsure at all n locations
ntagctntgtccncaaggcttcatgtagactggtcctttatcgcgaagtgaacctcggatccctgtcagatacaatactagaaggaattccatgcaaccttattacttccttgatgtacaactccactagcttctccattctatacttcatattcactgggataaaatgagcagatttggtgagtcgatctactataacccacacagcatcatgtccacgactagtcttgggtaaactagatacaaaatccatagatatgctctcccatttccattctggaatttccaatggcttcaattctcttgatggtcgctggtgctcaaccttagccttttgacatgtcaaacatcttgctacatattcagctacatctttcttcatgccatgccaccaaaaacttctcttcaaatcttggacatcttagtcattcctggatggaaact

SEQ ID NO: 19466 - DNA, 406 bp, Glycine max
  unsure at all n locations
agctttgcatattatcaataaaattgatatgctatcttcaaatcacaaacatccaattgtgctacatctctagttgtcattgcatgaatgtcaaactttctaatattaacaagatgatttatacttatagcatcttctgcataaaaaccaccacttcttccacatctaatactatcaaaatcataatcctcttccaccttatactcaatcgacttctcatcttccttattgtcattgtcatcatcttcaactntatcctctccatcttnatgcataaatacattaccatacgcatcacccaacacataaaacgaagctcccaaatcgccgaataacccttctcctactattatgncctncaaaccctacaaaataacacatttcaaaacataaataaatacatagc

SEQ ID NO: 19467 - DNA, 364 bp, Glycine max
agctttcatcacttattccgcaccagcatgattggagtaccgaccttaagtgttaatttgtgattaggtatccctgatgttttcaatgagtttagaaatttacgtgtcagtaatccgaaagtaggattgagtagttcatcttatttatcaatgttatcagtgctacaatactccttttcgtcattgggtatcaatgataagacaataatttattttgtcaacaatatcttttttagaggcaagaacaactcttttttgcaagtaatctgcgttgctatagttatgtgtcaagttgggatatgttgcatcaacaattgcctggataggatcagtatagtcctttataaggaactcatctgggatg

SEQ ID NO: 19468 - DNA, 466 bp, Glycine max
  unsure at all n locations
ctaagcttaacatcagaccacttccagggtgctggaactacttttatggacttgatggngcccatgcaagttgaaagccttggaggaaagaggtatgcctatgttgttgtggatgatttctccagatttacctgggtcaactttatcagagagaaatcagacacctttgaagtattcaaagagttgagtctaagacttcaaagagaaaaagactgtgtcatcaagagaattangagtgaccatggcagagagtttgaaaacagtaagtttactaaattctgcacatctgaaggcatcactcatgagttctctgcagccattacaccacaacaaaatggcatagttgaaaggaaaaacaggactttgcaggaagctgctanggtcatgcttcatgccanagaacttccctataatctctgggctgaagccatgaacacagcatgctatatncacaacagagtcacac

SEQ ID NO: 19469 - DNA, 453 bp, Glycine max
  unsure at all n locations
actcagctttatcctggcttctatggtggtgagcttgtctttactctctttttcttgaagcgacgtctccaatcatctttcttcttatccattccactgacattgatcttcaagaagaaaaggactccattgatgaagaagatccacggcctacaagctccacatggagctacatcataaaaagctatgtcttaagctcatgtgctacttcatcgccatccgatacctaaagtagtgaaacccctttgtgacaacaaaatatgcttttgttgagaataattgttgaggagttagccctcacagtaatggataaccacaaattggtacttgcgagatgatcttaaggttgtataaccttggagggagcgactntaagtcatgacgatagttcacatagatgacttggtaaccctgacaaatatataagccatcctcagatggtgagagccgtca

SEQ ID NO: 19470 - DNA, 446 bp, Glycine max
  unsure at all n locations
agctntaccttagtttcgttgcttacagaanaataaaataattcctatggttggaggattgtgaaatgacatttagaaagttaaaggagtttctttccactcctcctatcttgacaaagcccaagtcagggttgcccattataaaatacttgtcggtcttcgagcatgtcgtcagctcagttctagtacaggaatttggagttgaataaaagccaaattattttgtgaaccgggtgccttttggtttcgagattaggtatcaaagttagagaaattggcattggcagtacggatcacagctagaaagttaaagcattattttcatagttacccaattataatttgaaccaattaatctatcaaaacaaattntacagaaacaggatcttgttgatcagatgatgaagtggttgttgaactctcagagtttggtatatcgtttgaaa

SEQ ID NO: 19471 - DNA, 298 bp, Glycine max
agcttggagccggtcaaaatgccacagtagctgtaatgagctatagtggttatgatatacaagatgccattgcgatgaacaaggcatctcttgatcgctggtctgcgccctgtattgttatgaacaagcatgtcattttattcggcgattttatgcttttggttgccttatattttattgtctacgctttttaacgcagcatttctgatcttgaccttccctgctgtataggtataatgccatcatctacaaccattcgaatgacacatcataccgaatacttacgcctaatacaact

SEQ ID NO: 19472 - DNA, 438 bp, Glycine max
  unsure at all n locations
ntggcacacagctaatcattaccttcttcatggaattatggtaaacacagttctatcacacaataaaaaaagtgtcatataacctgcttaccgtctctcttgattttggtcgaagaccatgccattttggaattgcatgtgcactctctacataagctgcatttgttccagtaccaacaatcactccagcaacaacatcctgattgctgaatcttgctctagctactgttccgactgtgtcattaacctanatcacatcaccaagttntgtctctggttcaagacattaagtaaccaggaaatttaaaagaaaaaaaattgaaactacaaaactcattgatctaaattntccgccatatagaaactgaannatattctcanagccagactanaggggaaaaagaaaacaagacaaacaggaagagaagtacactgact

SEQ ID NO: 19473 - DNA, 450 bp, Glycine max
  unsure at all n locations
ggacctataaaactcagcttaagaaaaaatggcctcagcaagcttttatnttttaaagttattcaacaaaggcctccatctttatggagagggtaccactactggaaaacccaaatgcaaatttttatcgaggcaatagacttacatatttgggaagccatagaaatagggccttatatacccaccacagtagacagaattacaatagatggaagcacatcaagtgaaagcataacaatacaaaaacctactgatagatggtctgaagaggataaaagatgagtacaatacaatttaaaagccaaaagtataattacatctgccctgggaatggatgaatatttcacggtttcaaattgtaagagtgctaaggaaatgtgggacactctacaattaacacatgaaggaacaatagatgttaaaagatctacgataaacacattaactcat

SEQ ID NO: 19474 - DNA, 446 bp, Glycine max
  unsure at all n locations
ggacctataaaactcagctttacttggtgattgtgaagttttgaaaaattatttctgcctatgccgagtataacattttctgtttataacttattgatgtattaattgcattgatcatcactgaaaaatgttagattttggtgtctcatttcttgtttttataatgattgccaggatcactattttgatgtgataaccaacatagttggtttggttgctgctgtcctacgtgataaatttacttggtggattgaccctattggcgctattttgcttgcactctacacaatttcaaattggtctaaaacagtgcttgaaaatgctaggtctctctttctctcttcttattctgcgtcttatgctttgttcaattacgtactctatttaaatgatggttacctcttggnttagtttccttggttggacaatcagctccacctgaagtc

SEQ ID NO: 19475 - DNA, 451 bp, Glycine max
  unsure at all n locations
tgatattgaaagagaanttgttctacattctatatttattgntttgctcatcaacttcaatgagttcttgttacattggcaaaaaaacatgttcaaattgcattaattgttattcaatttagttgctaatttgtctaatattgttggagcatcatgtaagcactgngatatttttcgaaaaagtcaaattacaatagtgaaagaagcattgcaaaaaggagaaatctcaagtgagcatgacttgaatcaagagagcaggaaacactaaatgaagctcacattatggtacattacttagtttagtttctcttttttcttccatgattgatgtgcttgaaataattgaagaagatgacataagtttagagcanaaggctaaaatatgtgctttngtaaattctgtgcaagcttttgaatntgttttcatcttgcacttgatgaaaaatattct

SEQ ID NO: 19476 - DNA, 451 bp, Glycine max
  unsure at all n locations
tattgganatgaatcatatctcattctctgttttcatgccttggattttatntgtaaatgaattaagcagcttgttgaataatgagtctgttatttacttcatattaattttacgtgtcatttgctgcagactgattgggagggtggctacttcccgcttacgctgcactttagtgaagactacccaagcaagcctccaaagtgtaaattcccacaaggtttcttccaccctaatgtttatccttctgggactgtttgcttgtctatacttaatgaggatagtgtaagtacatctctcttgataattgcatgactgcttgaaaccaatntattttttgtgatattacatgctaagcaaacagttaagaattataggtttattgttctatacaggggtggagaccagccataacagttaagcanattcttgtgggcatccaagacttacttg

SEQ ID NO: 19477 - DNA, 392 bp, Glycine max
taacttttattccataacgaaattcaataaatacgcctcctatccttaatggagaaagttaccactactgggaacaccgaatgcaaatcttcattgaggcaatagacttacacacttgcgaagccataacagtaggaccttatgtacccaccatggtggctggaaatgcaacaatagaaaaacctagagaagagtggactaaagatgaacgactattagtgcagtacaatttaaaggctaaaaacatcattacttctaccctacgacatgatgaatactttacggtttcacattgtaagaatgataaggatatgtgggacactctacaagctacacatgacggaacaactgatgtcaaacgatctacgataaatactttaactcatgagtat

SEQ ID NO: 19478 - DNA, 442 bp, Glycine max
  unsure at all n locations
tctttgagaaaacttccttgagaagctagagcttagttacacacacccctctcataacaaagctcacctccttgagaagcttccttaagaagattcctaaagaagctagagcttagctatacatacctctctaatagctaagctcacctccttgagatgagaagctagaacttagctacacaccccttataatagctaagctcacccccatgacaaanaacatgaaaatacaaaaaaaaagtccttactacaaagactactcanaatgccccgaaatacaaggctaaaaccctatactactagaatggccaaaatacaaggcccanacgaagganaaacctattctaatatttacaaagataagcgggctcatacttagcccatgggctcgaaatctaccctaaagctcatgagaacnctagggcctacncttggatctcta

SEQ ID NO: 19479 - DNA, 436 bp, Glycine max
  unsure at all n locations
tgtagcaaattcaaaccccattaaattttaactcagatgtacgattaagtcccgcaatataacgagacgcttgatattgaaaacaaaagctctgagcaaattctaacgacaaanatgttttcctcggatgtctgattcagtcccgtaataaatcgagccgctcgtaattgaaaactgaagctccgagaaaattaaaatgacaataactttttactcggatgtccgatagtgtcccgtagtatatcgtgaaactcgacattgaaaacagaagctntgagcaaattcaaacgacaataactntttactccgatgtccgattgtgtcccgtagtacatcgagactctcgtaattganaacagaagctcgtagagaattcaaacgacaataactntttactcagatgtccgattatgtcccgtagtatatccatacgctc

SEQ ID NO: 19480 - DNA, 454 bp, Glycine max
  unsure at all n locations
ttgatatggaaattaagttgaaagtaaaggatggtatgtataggacatcaatcaatgtaatgaatgcagaaagctgtactgtgcctgagtgggtagcatgaacaaggtggccatttggtaatctaaccgtgatggggttaatttgatgatatgagtgaaagtttgttaaggaggaggaaacgtgatcagtggctcctgaatctaatatccaggaggtagagtttgctttttcgtaagatagggttatacctgttgcatcgttactagagcaagatgaaatggaagcgacctgaggcttggtggatgctgagtttcctgcatatggctgttgtattaaagccagcaatgccttgtactgctcangtgaanaacgaaccaattcttgagattcttggcgctgtatttggtcatctgtggcctttccttctacttgccactacgttgtagctattac

SEQ ID NO: 19481 - DNA, 357 bp, Glycine max
agcttataatatatcgatacgctcgtaattaaacatcggaaactcttgagaaattcaaatggtcttaactcttcacacggatgttcgattctggcgcataatatgtcgagaggctcgaaattgaacaacggaagctcttgagaaattcaaatggtcataacttttcacacggatgttagattaaggcgcattacatatagagacactcgataatgaacaacggaagctcttacgaaattaaaatggtaataacttttcacactgaggtccgattcatgcttataatatattgatacgctcgaaactaacatcggaagctctccagacattcaaatggtcataaatcttcacacggat

SEQ ID NO: 19482 - DNA, 453 bp, Glycine max
tgaatcggacacccgtgtgaaaagttatgaaccatttgttatttcacgttatgctttgttgttcaatttcgagtgtcactatatgtgatgcgccaaaattggacattcgagttaaatgttatgaccatttgaattactcaagtgcttccgttgttcaattctgagcgtgtcgttatgtgattctcctgaatcggacatccgtgtgaaaatttatgaccatttgaatttctcaagagcttttgatgttcaatttcgagcctctcgacatattatgcgcccgaataagacatccgtgtgaaaagttatgaccattttaatttctcgagagctttcgatgtttaatttcgagcgtatcaatatattataaggctgaatcggacctcggtgtgaaaagctatgaccatcttaatttcatgagagcttccatgtttcattttcgagcgtctctatatg

SEQ ID NO: 19483 - DNA, 453 bp, Glycine max
  unsure at all n locations
actaagctaacaggcccttataggctgaaacaagcaccaaggtagtggtttgaccgactaanaattactttgattcagtttgggtttcaagctagcaagtgtgatccatccttgttcatatataagcgtcaagctcacactatttttcttctagtatatgtggatgatattatcttcaccgacagctcatcttctctcatccaacagattacaactcaacttcattttgcattctctcttanacagctaggtcaattggactatttcttgggtattgagatcaagtatctacttgataggtctcttctcatgactcanagcaagtacattagagacctccttcacaggactcacatggctgaagttcattctatttcttctcctatgacctcttcttgcaaactgtctanaactggtggtgaattatttcangatcctactctctacagatct

SEQ ID NO: 19484 - DNA, 257 bp, Glycine max
tagctgttcttcatggttggcatttgcgccaacctaacgtaaaaaatgctcttctccaccgtgagcttaatgaggaggtatacaagcaacttccctcacggctctcggttgataatccttaccaggtatgcacgctgcaacgttccttatacggtctcacacaagctacccgacaatggttcactcgtctctacttatttattgtttctcatggctatcacaaagcctccgctgatcattccctcttcttaagcttc

SEQ ID NO: 19485 - DNA, 436 bp, Glycine max
  unsure at all n locations
tttgttntcaatttcgaccatctcgatatattaccgttctcatccggacttccgtgtataaacttattgtcaattcaattttctccgagctttggatcaaaattttgagcgtattgatatattacgggactcattcagacatccgagtaaaaaattattgtcgttagaatttgatacgagcttccgttttcaatttggagcatctctcgctaaattgcgacagtctgtcgggcatccaagaaaaaatttattgtcgtttcatatttctaagagtttccgttttcaatttggagtgtctcgatatattacgggactcaaccggacatccgtgtataaagttattgtcatttcaatttgctcagagcttctagtctcaatattgagcgtctcaatatattacccgattcaatcggacatgcgagtaaaaagttattgt

SEQ ID NO: 19486 - DNA, 282 bp, Glycine max
tcacgcttatactaatttatcctaccatgctcagactgaccggcggactgaacggaccattcacccgctggacgaccttttgagggcatgtgtcttaaagcacaagggcagtcggcacagtcttttgacgttgatagagtccacttataacagtagctctccctctaccattagcatggctccctatgaagctctgcatggtacaacgtgttgcacacccctatgtctgctatagcccggagaagacactcacccacgccctgcactggtgcatcaccacac

SEQ ID NO: 19487 - DNA, 364 bp, Glycine max
agtgcacaatatcatctctaatatttctatgaagagtttttattttaaaatccttgcttagcaacattcacttttttgcccgaactagcacagaatatgcctagtatttacttaatagcatcaatctgctctaagtttgttcctgcacaacatagaaaatcatttgcaaaggcaaggtaagaattttttggaccacctttagatgattcaataggcttccaaattttctgctccactacatcattaatcaattgaaataatctctcaatgcaaagaacaaatagatatacagagataggatcctctatcacactcctctaacatgaatgaatttttcaagagcttctccattccacatcacctg

SEQ ID NO: 19488 - DNA, 449 bp, Glycine max
  unsure at all n locations
ctataaaactcagcttntatagctttgttaacctatcatttaattataatttttattaatgcaatcaatctaaagcaaaagaaaaaaaatgcaatcaatcgtttccaaaattcttaatagaaattttaatcaattgtcaagctatttaagcaactatctattattaaacacatatattaaatattataacatatatanttttgcatatctaaacgttgggttatcttgtttaattttcaaacctgatatcagtgtaaaaaatttctaattattaatgcaaagtctattctttttctcatatctataattctagttcttaatattctgtttatctaaatctttaatttcaaaatattttatctaaaggttcctttaatggtgaaattgaacgaatagaaaataaaaactttaactgtaaataatctattcacaaatgattttcttatata

SEQ ID NO: 19489 - DNA, 340 bp, Glycine max
  unsure at all n locations
agcttgccccttgatgacggtttcttgtggacgaaggcatgcacgtattgtttcatcatgcgatcncaaacttccgttcgtccatctgtttgtggatgataagctgagctcatccgcaatttcatgtcgctcatctgaaacaggtcttgccagacaattgcttatgaataatgggtctctgtcggagatcaagctgcgtggcatgccatgacactctctgacgatgtccatgaacaggatgacgactgactaacctgagtgctgagctggcagcatgcctacgtgtatgcctcttgaacctcgatctactacacacaatatggcagtatttctgtgaatc

SEQ ID NO: 19490 - DNA, 454 bp, Glycine max
  unsure at all n locations
ttccataccttgagggaactcaactcatctaagattctatataaaggttctntatgactagtacccttgccattaacactagatgaatgatgactcatgttgcttcctaagttgtggttctttcttgttggaggtttgaaaacaaaaggtaaaagaaactatggttgaaactagccaaataaacactaaaagaggtgtgaaagataaggtaaaaaactaattggtaaaaggaaagctatctangcggtttgacaatggaaggtaaaggaaataagctatgaaagtaagcaagacatgtaaactaggcgaatcctaagagtgtttggatgaccacattcaaggttcccaacanaacactcactatcctaaggaaaaattgcctaaaattattacacacaaatggaagtttggtaacctattggaggctcccaacacactttcaatgaaaggcctt

SEQ ID NO: 19491 - DNA, 452 bp, Glycine max
  unsure at all n locations
nttgatttcaatctgaagcatctcgatatattacagtgtttcagtcggacatccttttanaaatttattgctgtttgaactttctaggagtttctgttttcaatttctagtgtctcgatatattatgggactcaatcggagatcctagttaaaagttattgtgatttgcttatgaaacgagctttcgttttcaatttcgagcgtctcgatatatgacgggactcaatcggacatccgagtaaaaaagttattgtcgtttgaattntatacgagcttccgttgtcaatttggagcatctcgatatattaccggactcaatcagacatccgagataaaagttacagcggtttgaatttgctacgagccatccgtttcaatttcgagcgtctcgatatattatttgactcactcagaaatttgagtaaaatgttattgtcgttcgaatctgatac

SEQ ID NO: 19492 - DNA, 431 bp, Glycine max
tcggcattcaagtccaatcgtctcgatatattacgggactgaatcaggcatccgagtaaaaagttattgtggcttggaattgcagagagcttcggtattccatttcgagcgtctcaatatattacgggactcaatcagacatccgagtaatacgttattgtcgtttgaatttgctcatagcttcgataatcaatttcgagcgtctcgatatattacgggactcagtcaaacaaccgagtgaatagttattgtcgtttgaatttgctcagagcttcaacattcaatttctagcatctcgatatattacatgactcaatcagacatccaagtaaacagttgttgtcgtttggaattgctcagagtttcaacattcaatttcgagcgtctcgatatattacgggagtcaatcgaacatacgagtcaaaacttat

SEQ ID NO: 19493 - DNA, 409 bp, Glycine max
  unsure at all n locations
agcttgtgacttttgtaangtctaacgaaagggaaacaggaccaaccaaaggctctaagaacgttataatctggattcttgttgacaaagacagtagtatagggaacattacaatgcacagaagcagtacgcaatctatctatcaagtatgctgctgtagtgaaggcaaaatccccaaacttgagaggcagtgaagcttgtttaagaagagcgagtcctaattccacaatatgtttgtgtttcctttccactacaccattttggtgatgagtgtgtggacagatcaatctaagagtgataccttggcttgctaaaaaattagtgagaggtctgaactcttctcctcaatctgtgtgaacactcttaattctggagtcaaactgaagttcattagcttgaactgttgaaa

SEQ ID NO: 19494 - DNA, 323 bp, Glycine max
  unsure at all n locations
agcttatacattttactcatttaacaagaattgccactgaaacgatagcattggctgcacttgcaatccttggccacagatcagcacactcttttccaatgggaccagtgatagcagaacctacattgaaacatgtcacaaacaaaattactaccagcaaatgcatcaatagaaggtcaaacggcaaagatgaagagaataacaagtacatgagaacatctcatctgtatttctttctttttgaaagccaaaaataatcagtggctactcactacataaacatgcactttgttaccatgcanataaaatcataaacgatacct

SEQ ID NO: 19495 - DNA, 311 bp, Glycine max
  unsure at all n locations
agcttctattctgaatttcaagcgtctcgatgtactacaggacacaatcaaatatccgagtaacaagctattgtcgtttgaatctgcttagagcttctgttctcaatttcgagcttctcgatatattacgagactcaatcggacatccgagtaaaaagttatcgtcgttagaaatttctcagagctttcgttatcaattaccagttactcgatatattatgggattcattcggacatccgagtaaaaatttattgtcgtttgattctgctcagagattncgctatcaattacgaggatctcaatatatcac

SEQ ID NO: 19496 - DNA, 404 bp, Glycine max
  unsure at all n locations
ntgagcaaattcaaacgacattaactntntactcggatgtctgattcagtcccgtaatatatcgagacgcttgaatttgaatgccgaagctctgagcaaattcaaacgacaataactttttagtcggatgtctgattgagtcccgtaatatatcgagatgctcgaaatggaataccgaagctctgagcaaattcaaacgacaataactttttactcggatgtctgattgagtcccgtaatatatcgagacgctcgaaatggaattctgaagctctgagcaaattcaaacgacaataaattttaactcagatgtctgattgagtcctgcaatatatcgagacgctcgaaattgaataccgaagctctgatcaaattcaaacgacaantaacctttactcggatgt

SEQ ID NO: 19497 - DNA, 378 bp, Glycine max
  unsure at all n locations
ctataaaactaagcttaacctagaggaccagactatccagtgttggttttatcacgacaatgtctacaagattgacttgcctagtgagtataatgtaagtgccattttcaatgtgtctgatctatctctttntgatgcagatggaggggccttgggtttgaggacaaatccttttcaagaaggagggagtgatgatgacataaccaagggcaaggaccatgaagcacttgaagggcctatgaccagaggcagacttaaacaagcccaacacatcatagagacaaggttggtcatttgtatagctgccattgatgatgattgaaggcccaagtggagaaagatgaatgcccagaggcagaggcactaccaagactacta

SEQ ID NO: 19498 - DNA, 402 bp, Glycine max
agcttgttgtcattaaatcttacatgaatggccttttctacagtcaaggttctggagttatgcactctgtatgccttggacaattcaaagtattcaagtaagattctagaatcacactaggagtcaaactttccaagtttatccttggtgtttaggatgaaacgctgacatccaaatgagtggaagtaagagatattgggcttacgtctcttccataattcatagggacttctttaagataggccttatgtaaattttgttctataaataccaggaaacatttacagcttcaacccataaatctttgggagttgagtgatcgttaagcattgttcatgccatttcctgaagagatatctcttttctctcaacaacttcattctgttgtgctgttcttggagt

SEQ ID NO: 19499 - DNA, 450 bp, Glycine max
  unsure at all n locations
tgccagaaagganaacaagtaaaaagttcttttaaagtcaaaaatgttgtttctacttctaggcctttagagctcctacaccttgacctatttataccaactaggacaacatccttctatggacgcagatatggtctggtcatagtggatgattacactagatggacatgggttaggttcctaacccacaaggatgagtcttttgataccttctataaattttgtaaaaagatttacaatgaaaaaggtatttgtatctcttcaatcagaagtgaccatgagggagagtttaaaaatgatatttttgaaaaaatttgtcaagagaatggtattcaccacaattttccactccaagaacaccacaacagaatggagtttttgagagcaaaaatagatctctttaagaaatngctangaccatgcttaatgacccacccaaccctaaatact

SEQ ID NO: 19500 - DNA, 383 bp, Glycine max
gctttaatggcctagtgaggatggagaggcgcaactaagaagccagtggagtttgatatctccattgaacagtacaatgataaggtgctttgtgatgttgttactatggacgctagccacttactcttggggagaccatggcaatttaataagagggctaatcatgatggtttcaccaacaatatctctctcacggatcaacgcacaaagatgtgctctaaccattgagtccacaagaagtgtgtgaggatcaaagacaaatgagagagataattcttcaagaccagagagacatagaaaacagagccaaacacttgagagttcaaaaagtgacgacaaacagagggaaacacacgagaggacacagatgagtgaaacacttg

SEQ ID NO: 19501 - DNA, 430 bp, Glycine max
  unsure at all n locations
ttgatggtgttgagaagaaatcacatgtttgtcatcttcaaaatcttcatgattaatttgatgatgtttgtgaacttttgaatgagtttttgatgctttgttactccttaaatatttgactttcattaatatttttttatttatttattatcttataggtatgtagaaaaacctgaaaattatcctgtcataggaacaaaatgggtttttagaaataaattagatgaacatggcatagtaagaaacaaaacaatattgctttatccattgctaaagcggaatatatctctgccggcagttgttgtgcacagattntatggatgaagcaacaattatctgactatggtatccttcttgatcacatacctattangtgtgataatactagtgccataaatctatccaaaaaccctgtacaacattctcgaat

SEQ ID NO: 19502 - DNA, 392 bp, Glycine max
agtttggctctggccatcagaaccatctcattctctacttcatccatcttggaataaacattcctgtcaagtgagtgtctttttgcatcaaacaaatcaaatgtgatcttctgatcatctattcctatttccagattacctttccctatatccaccacacaattggcggttagcatgaagggacaacctaaaatcagaggggattcagcatcctcttcaatgtccatgatcacaaagtccacagtgaaagtgaattgtcgcaccttgaccaatacatcttcaaccatgccataacgccttgaaatgtaacgatttgccagctgcaattcattcttgttgcataatttcagctctccaatcttttgcacatgagagcggatcaaataatacta

SEQ ID NO: 19503 - DNA, 378 bp, Glycine max
agcttgcacatcttctcgatcaggttgacaattcaaatctaattgtcccttggcagcttcagccaccgcatggttttgactccttgaatccaattcattctgcacccgtacctcattctccaatctgtcaactggagttaaatgtcgtaaggtgctatctacttctgattcatctttggtccgccatgataactgatttctctgagcaatctctgcttcacgttcggattgccgcttcttctttcgcatcatcagggttttaaaccgacgtttaactgtcatgcacacattgcatgtgcatgtgggtttgtgtttgcccttcccacttggtggctggatacagacaatgcatgagcacccaggtctatgccgaggatg

SEQ ID NO: 19504 - DNA, 279 bp, Glycine max
agcttctgtctttactttgaaccggtcctggtctatccacttgtggaaccaaagaaaatgaaaacaaagcacttcttctatccatacttagagaacttgcgttcttgttccactgggaaaaaaccagtccaatgaatatggtcaagtgttctacgcaaaccatatgtattgacagcttcattagcagctctaaagccaccaccaatagctggggaagaatcattggccatctgattcttgacaaattcacccaatttattttccacatgagattctgcc

SEQ ID NO: 19505 - DNA, 409 bp, Glycine max
  unsure at all n locations
agcttccaagaatcaagatcaagattcatgaatcaagagaagacttaatcaagataagtatgaaaaggttttttcaaaaactgagtaccacatggatttttctcaaaacatatttaccaaagactttttactctctggtaatcaattaccagattattgtaatcgattaccagtagcaaaatggatttgaaaaagttttcaaatgaatttacaacgttccaattgatttcaaaaaagctgtaatcgattacaatgttttggtaatcgattaccagtgcctttgaacgttgaaattcaaattcaaatgcgaagagtcacatcctttcacataaaagatntgtgtaattgattacattgatttggaatcgattaccagtgattggttctgaataaactaaaagatgtaact

SEQ ID NO: 19506 - DNA, 397 bp, Glycine max
  unsure at all n locations
agcttctggatatactatgcatctgaatcggacaaccgtgtgacaagttatgactatntgaatctctcgagagcattccttattcaatttcgagcgtgtcgataaatcatgcgcctgaatcggacattcgtgtgacaagttatgactatttgaatttctcgagagctgccggttttcaatttagagcatctcgatatgtgatgcgccagaatcggacatccgtgtgacaagttatgaccatttgaatttctcgagagctttcgatgttcaatgtcgagcgtctggatatattatgcgcctgaatcggacctccgtgtgacaagctctgaccatttgaatctctcgagagcattcgttgttcaatatcaagcgtctcgagattatatgcgccttgatc

SEQ ID NO: 19507 - DNA, 309 bp, Glycine max
agcttgtgggattatgtgatagtgatcttgccagacatgctgatgatatgataagtactactggatctgtattctttatgggcgattgagtatttacatggagttctaacgaacaaggcattgtgacactttttacttgtgaagtcgaggttataactacaacttcctgcacatgtcatgccatttggctaagaagattgttggaggaacttcagttgctgcagaatgaaagcaccaagatctatgttgatagttgatctgcgcaagagctcgccaagaatccggtgttccatgaacgaagctagcata

SEQ ID NO: 19508 - DNA, 320 bp, Glycine max
agcttatctatgggggcagaatcactctcattaactcagtcctatcagctctacctatctacttactatccttctttaagatccctaaaaaagtggtgcacaaaattgtttccatccacagaaatttcctttggggaggtcatcaagaggccaacaagattccttgggtgaagtgagacacagtttgtcttcctaagaacaaagggggcctatggattaaagatttatctaaatttaatgacgctctacttggcaaatgggggtgggagctggctaataatcacaaccaaccttggactagaattttactttctaaatat

SEQ ID NO: 19509 - DNA, 390 bp, Glycine max
agcttgtgcctcttctcgtctggaatatgaatgtagcatatagatccaaagacccttatgtgctttgctgatggcttcttcccgttccaagcttcaattggagtcttgtcttttacagacttagttggacatctgttgagtatgtaaacagcagtgtagactgcttcagcccagaatttgttaggtagtcccttctccttgagcatcgatctagctatttccataactgtgcgattctttctctcggacactctattttgttgaggagaatatgagactgtaagttgtcgctcaatgccttcatcctcacaaaatcttttaaactcgcgagaggtgtactttttgccgcgatcacttcttagtacttttatccgttttccactttgattt

SEQ ID NO: 19510 - DNA, 390 bp, Glycine max
  unsure at all n locations
agttttcttaagaagattcctaaagaagctagagcttagctacacatacctctctaatagctaagctcacctccttgagatgagaagctagagcttagctacacaccccctataatagctaagctcacccccatgacaaaaaaacatgaaaataacaaaaaaagtccttattacaaagacaactcaaaatgccccgaaatacaaggctaaaaccctatactactagaatggccaaaatacaaggcctagacaaaggaaaaacctattctaatatttacaaagataagcgggctcatacttagcccatgtgctcgatatctaccctaacgctcatgagaacnctanggcctttccttggatctctagcccaatctacttggagtcttctag

SEQ ID NO: 19511 - DNA, 364 bp, Glycine max
  unsure at all n locations
agcttctaaactttgtacaagaatgaagctctgataccacttgttagacaagtggcctcagatatcttaagaaggggggggttgaattaagatattcgaaactttttcccctaattaaaaatctatcttactttttacttaagttatgaattcccttaatgacaatcttcttaaatattaattcaaatgaagcaacttgaatatgaatataaagcaataataaataaaggagattaacggaagagaaaatgcacactcagttttatactggctcggtcacacccttgtgcctacgttcagtccccaagcaacccgcttgagagttncactaacttgtcaattccttttacaagttctaaacaca

SEQ ID NO: 19512 - DNA, 385 bp, Glycine max
agctttggagaaccaagccaatcaaaatgctagacgaaatatagatgggaatagaggtaacaatggcggtaatgacggaccgaggcagaaccgggttgagggagtaaagctcaatgttcctcccttcaaaggtagaagtgatccagatgcctacctggactgggaaatgaagactgagcacgtatttgcctgcaatgactacactgatgcgcagaaagtcaagctagcagcagctgaattctccgactatgcccttgtttggtggcataaataccaaagagaaatgttgagagaggaacggcgagaggtatatacatggactgagatgaaaagggtgatgagaacaaggtatgtgcccactagctataacagaaccatgcgacag

SEQ ID NO: 19513 - DNA, 381 bp, Glycine max
agcttgccgccacggagttttccgactatgctcttgtgtggtggaacaagctacaaaaggagagagcaagaaatgaagagccaatggttgatacatggacggagatgaaaaagatcatgaggaagcggtatgtgccggctagttactcaagggacttgaaattcaagctccaaaaactaacccaaggcaacaagggggttgaggagtatttcaaggaaatggatgtgctcatgattcaagcaaatattgaagaagatgaggaggtaactatggcttcgatttcttaatggttgactaatgatatctgtgatattgttgagctgcacgagtttgttgaaatggatgatttgcttcacatagcaatccaagtggagcaacaat

SEQ ID NO: 19514 - DNA, 430 bp, Glycine max
  unsure at all n locations
attgttttcaattatgagcatctcgatatattacgggactcaatcgtgtcatccgagtaaaaagttattgtcgtttgatttttctcagagcttcagttttcaatttcgagcgtctcgatatactacgggacacaatcggacatccgagtcaaacgttattgtcgtttgaatttgcttagagcttttgttttcaattacgagcgtctcgatatattatggggctcaatcggacattcgagtaaaaagctattgtcgtttgatttttctcagagcttcaattttcaatttcgagcgtctcgatatactatgggacacaatcggacattcgagtcacaagttattggcgtttgaatttgctcacagcttctgttntcaattacgagcgtctcacatattacgggactcaatcggacatccgagctaaagttat

SEQ ID NO: 19515 - DNA, 388 bp, Glycine max
agctttgcagcctattccttccttgaagtagctatggtcttttctggtgtcctcttgatctccctatttgaaacttcaacttgtccatttgtttgcggatgatagagtgatgctaatatgtgttgaacatcatattgttggaggacgtttgaaagttgatcattacaaaagtgtgtacctccatcactaatcaatagtctaggcactccaaatctagaaaagatgtttctctttaagaacttaatcattgtctttgcatcattgattggactagcaattgcttccacccactctgagacatagtgcaccactaccaagatatattcattgccaagggaggatggtaagggaccaacaaaatcaattccccaacaataaaagacttcta

SEQ ID NO: 19516 - DNA, 321 bp, Glycine max
agctttggagcttccatgtgccaatttttcttcttctttagtccagtcttcttctggcttcaattcatcagtgggctctccttctgtgtgcagcatctagggatgttcccagcctttgatgacagctttccaggttctgctatccagtgatttgacgacagccaccatccttgctgtccagtatccatagttggttccatctacgattggtggtctgttgactgtgcctccttctatctccatgtgcatcagaatttatttccctatatctcactctgtgatctcgaatgttggctcttgatccaatcgagattctgatcc

SEQ ID NO: 19517 - DNA, 411 bp, Glycine max
tgcccttctgatccgaagaggctgacccttgcggagtccgtcgagagcgaaattgacctcgtcaacgtgctccatcatctctccgaactcctgcgcctccatcagcgtcgacgtcgccggaatcccctccgccggcgcccgctatgccctcttcgactcccttgctccgcctgcgccggtgccgtttccgaagtcgccgatctccgaatcgaaaaaggaccaacgctgcgaggacgagtcctgtgaggagaacgcgaagccgcagagagggtcgtctatctcctgagataaggaatccctgaatggctccgcaacgtcgtcgtttagagaggacgagcccgaatacgttcccgaaagggtttctctgcggcggtcgcacgtgcggacgatcatcttatacggggatcggcg

SEQ ID NO: 19518 - DNA, 381 bp, Glycine max
tgtctgcaacctcataaaggtgcttggcgcattagctgagcctaaaaagcatcactagccattcatacaaatcaaacttagtcttgaaagcggttttccactcatcagcctttttcatcctgaattggtgatacccacttttaagatcaatttttgaaaagatattgtcaccatgcaactcatcaagcaaatcatcaagtataggaatggggtgcctatactctacagcgatgctgctgatggccctgcaatttgtacacattctccacgtaccatcctttttgggcaccaacaacactggcccaacacatgggcttatgctcttttgacccagcccttcttaacaatcttttacctgaaatctatctcctatctcctgag

SEQ ID NO: 19519 - DNA, 424 bp, Glycine max
  unsure at all n locations
tgtcaaagccttgtatggattgaaacaagctccaggttcttggtatgaaagactatgctcattcttagttcagaatggcttctccagaggaataatggacaccacattatttagaaaggctcagaaggaaaatctacttattgtacaaatctatgtagatgacataatctttggttcaaccttagaaaggacgtgcaagaagttttttgagctaacgaaaggtgaatttgaaatgagtatgatgggtgagctgaagttcttcctagggcttcaagttattcataaagatgatggaatattcatccatcaagagaaatacacaaaggatctacttanaggttcaagatggatgaaaccaaacctatggctgcccctatgcatccaactattgtcagtgacaaaggtgagaaacacaatgatactc

SEQ ID NO: 19520 - DNA, 402 bp, Glycine max
  unsure at all n locations
agctttgaatgctctattcaatggagttgacaagaatatcttcagactgatcaacacatgcacagtggccaatgatgcatgggagatcctgaaaaccactcatgaaggaacctccaaagtgaagatgtccagattgcaactattggccacaaaattcgaaaatctgaagatgaacgacgaagaatgtattcatgacttccacatgaacattcttgaaattgccaatgcttgcactgccttgggagagaggatgacagatgaaaagctggtgagaaagatcctcagatccttgcctaagagatttgacatgaaagtcactgcaatagaggaggcncaagacatttgcaacttgagagtggatgaactcattggttcccttatacctttgactatgactctcgg

SEQ ID NO: 19521 - DNA, 428 bp, Glycine max
  unsure at all n locations
tgaaggtgtgtagcccatcatcttttcatagtagaattctggtaatgtgtctactatcattatcatcatttttttctccgtcattgaggtgccacttgagctgccaggtctctccacctttaggcgtattcttttgaaagattcgtgccccctttttgcacatgttctgtagttgcatcctatccgaagacattatactgacactgcctaacgaaggcaaccattangtcctcccangaatggactcgggaaggttccaagttagtgtaccaggtaacaactaccccagtaagactttcttggaaggaatgtactaacaattcctcatcttttgcgtatgcccncatcttccgacaatacgtctttagatggttcttggggcaagtaatccccttgtacttgtcaaagtccagtaccttgaacttgag

SEQ ID NO: 19522 - DNA, 377 bp, Glycine max
tgggttaagttgagttggttcatcatattgagaccattatgttcattaatatcattaatttgtataaatgttgttacaatctacatgtgtatatcatgctgcttatgaaatttagtttattacaaaaacttcttgctcttaattttgatatgtatggcgtgacaccctttaccccgacatatacataaataaataaaatatgtaaatatattggtaaacaaatccacgtgggtaaaagattcacattcacttcactattatcaaatataatttgtataaatgttgtttcaatctacatgtgtatatcatgttgcttatgcaatttactttattacaaaaatttcttgcttttaattttgataatggatggtatacat

SEQ ID NO: 19523 - DNA, 375 bp, Glycine max
  unsure at all n locations
agctttgtcaaagttagcatggatggagcaccttacctccgcaaagttgacttgaagatgtacaagagttaccctgagctctctgatgccttgggcaaaatgtttagctccttcaccattggtaactataattaatccataatttaccatacattaacttttttttatatagaatttaatgactgatcataacttttacgtatcagtatctagtttgttttctctttaatataactaccaaaagatatggatcttanatttgattctgtagaaagttaactaatggtgtatgtgaatataaaattgaatcgtgcagctgattcgatggtattaattattggtgtgttcttgatatatttaaggaaattgtgaatc

SEQ ID NO: 19524 - DNA, 390 bp, Glycine max
agcttatcacccttaccggctattaaaaaatcttttaagggaagttaagagcatgatagtgtgctgataccattaactagtcaacaggttcttgagcgggttgagggcatcaatactatatttggaaagacccaaaagaagaaaaaaaaaagtaaaacttccatatggaagatgaggctgatattgtttgatcttccatactggttcgatctagatgtcatacattgtattgatgttatgcatgttgagaaaagtgtgtgtgatagtgtcatcgacaatcttcttaacattcaaggcaagacaaaggatggtttgaatacttgccaagatctagttgagatgggtatacgagaccagttacatccaaggtttgatggtaagaaaatatac

SEQ ID NO: 19525 - DNA, 394 bp, Glycine max
tccatcacattctaaatgtagtttggagaatgaacgatctgctttcttgtaacataaacgtttaggtcacatttctagagaaatgatggaaagattaataaagaatgaaattcttcctgatctacattttacggatctaactatttgtatggattgtattaagggaacacaaacaaaacatacaaagaaaggagctaccagaaacactcggcttcttgaaattgcgcatactgatatttgtgaatcatttgatgttaattccttcatacaagaaaaatactttatcacctttattgatcactattcacgtcacggttatgcctacttactgcatgagaactctcaagcagcggatgccttataaatttacttgaatgaagtacaaagacaatta

SEQ ID NO: 19526 - DNA, 385 bp, Glycine max
  unsure at all n locations
agcttggagctggttcacgctggcgtcgtacaactggtcaggaaatttattctccattcttagtggctttcacacatgaggtatgacttaatttgtttcacgtacttaattatggattaataatcatcaccatattatactcatgattttttttattgatcagaactcggaaaactggaagtcctctcatttgacaaaaggaactatcatggatccaaattacagcttgcctcccaatattgctctgataactcttgaggtagagcaacttttccaaggatatatatctatagtctataacactcttgactctntttgtctcanactaaaatgttctgcatgagttggatggtggaattgtgctctttccgttggcacatctata

SEQ ID NO: 19527 - DNA, 393 bp, Glycine max
agcttcaacatcagaccacttccagggtgctggaactacttcacatggatttgatggggcctatgcaagttgaaagccttggaggaaagaggtatgcctatgttgttgtggatgattcctccagatttacctgagtaaactctatcagagagaaatcagaaacctttgaagtattcaaagagttgagtctaggacttcaaagagagaaagactgtgtcatccagagaatcatgagtgaccatggcatagaatttgaaaacagcacgttcactgaattctgctcatctgaaggcatcactcatgagttctctgccgccattacaccacaacagaatgtgatagttgagatgaaaaacaggaccttgcaagatgctgctcgggtcatgcttcatg

SEQ ID NO: 19528 - DNA, 404 bp, Glycine max
  unsure at all n locations
taaacattcaatttcgaggctctcgattattacgggtatttaatcaagcatccaagaaaaaatttattgtcgtttgaatttgctcagagattcaacattcaatttcgagcgtctcgatatattacgggactcaatcagacatccgagtaaaaagttattgccgtttgaattggctccgagcttcaacattcaatttcgagcgtctcgatatgttacgagactcaatcacacatccgantaaaaacctattgtcgtttgaatttgctcagagattcaacattgaatttcgagggtctcgatatcttacgggactcaatcagacatccgagtgaatagctattgtcgtttgaattggctcagagcttcaacattcaatttcgagcggctcgatatattacggtact

SEQ ID NO: 19529 - DNA, 440 bp, Glycine max
aaactaagcttacaaaagtttgtatggcttgaaacaagcaccgaggtagtggtacaagaagtttaatgagtttatgagcaactcaggattcaaaagatgtgacatggaccattgctgctatgttaaaaaatatactaatagttatgttatccttgttgtgtatgttgatgacatgttgattgcaggatctagtatggcagaaattaacaggttgaagcagcagttggcagaaaactttgaaatgaaggatcttggtccagctaaacaaatccttggtatgagaattcttagaaacagatcagaaggaattttgaagctgtctcaggagaaatatatacacaagttgcttgacaggttttaccttggagattctaagaccaggaatacccctctgggatctcatttgaagttttcaaagaagcaatctttgcagacaaatg

SEQ ID NO: 19530 - DNA, 386 bp, Glycine max
agcttatcaaaattgaaaatgatggttcctaatctcaagaatcttagagtcttagattgtgagtcttgccaactaggaaaacatgttaggtcatcatttcctcaaactgtacaaagatgtaactctgctttctctaccattcactctgatatttggggaccaagtagggttacatcttttgattttcggtattttgtaaccttcattgatgaatttttcagatgtacttgggtttatttaatgaaagacagatctgaacttttgcctatattcatgttgttctttaatgagattgagaatcaatttggcaaatcaattaagattttcaaaagtgataatgctaaagagtatttctctcatgatctctcttcctttttatcttcaaa

SEQ ID NO: 19531 - DNA, 411 bp, Glycine max
tggagtaagttcctgagaccgaggactgcttatgaggtcgtagcttgaccatgacccaatcaccttccttaaaggtgacgtccctacattttttatctgccatttgtttcatgaggtcctgagctttcaacagcttcttgcggattaccacgaaggcctcatctctgattttcaaaacctcatctactatgcccaatgtcaaggtgactgtaatgtattgtggtatggtgaggggtttcttgctgaaagtcatctcgtatggggacaaactagagccggagtggaccgaggtgttatagaaccactccacccaatttaaaaacttcccccatgaagacggcttcttatgaacaaaggctcgaagacattgttctatgacacggttcagcacctttgtctaaccatcgatct

SEQ ID NO: 19532 - DNA, 329 bp, Glycine max
agcttggagtgacctttgtgttgacccgagaccgaaatttgtctgtgtgggcgaagtttgaccaaaaccatatcaccaacttggtattcagcttcacggcgctttttatctgctaaatactccatgcgattttgagctttctccaattttttcttgatttctgcgaaaatagcctcgcgatcagtgagcatgacattaacaacatcaatgttagaattctctgcccaatattgagaacagttgaaaggcttcttcgcacatgtgatctcgtacggggaaagacctgagcttgagttccaagaggtgatgtaagaccactccacccaacc

SEQ ID NO: 19533 - DNA, 373 bp, Glycine max
  unsure at all n locations
tttcatgcaagctttaagaattatggcctcatcgaactacttgtttctcgagggaaattctataaatagacctcccatctttaatggagtgggttaccactattggaaaacccgcatgcaaatctatatagaggcaatagatttaaatatttgggaagccatagaacaaggaccttatgttccctctatagtggccggaagtgcaacaatagaaaaacctagagcatattggactgaggaagaaagaagattantacaatataatttaaaggccaaaaatattattacatctgctctatgaatagatgaatactttacggtctcaaattgtaacagtgctaacgatatgtgggataccctacaagtaacacat

SEQ ID NO: 19534 - DNA, 389 bp, Glycine max
  unsure at all n locations
agctttcatacatcagaccacgttccacgggtgttggaacttacttcatcatgtgacttgatgagggccctatgcacagttgcaaagcacttggatggaaaagaggtactgccctatcgttgtttgtggattgactttctccagaatttacgctgggtcaatctttatccagagaggaaatcagacacctcttgaagtattcaaagagttgagtctaagacttcaaagagaaaaagactgtgtcatcaagagaattatgagtgaccatggcagagagtttgaaaacagcaagtttactgaattctgcacatctgaaggcatcactcatgagttctctgcagccatcacaccacancataatggcatagttgaaggaacaacatgacttt

SEQ ID NO: 19535 - DNA, 370 bp, Glycine max
  unsure at all n locations
nttgagcaattcaaatggtcgtaacttttcactcggatgtccgattcatgcacataatatatcgagacgcttgaaattgaacaacgcaagctctcgtgaaattcaaatggtcataactttcaactcataggtccgattcaggcgcataatatatcgagatgcacgaaattgaacaacggaagctctcgagaaattcaaatgatcataacttttctcacggaggtcagatttatgcgcataatatatcgagacgcttgaaattgaacaacggaagctctcaaaaaattcaaatggtcctaacttttcactcggaggtcccattcaggcgcataatatatccagacgcctgaaattgaacaacggaagcttt

SEQ ID NO: 19536 - DNA, 398 bp, Glycine max
  unsure at all n locations
agcttagcaaatggttctgngtgttgcccagtttcatcatatcttccgtaatactcatcacctctatcatatctaataattttcacatttatgtctaattgcccttttacttcattgtagtaaatttctaaggcatccattgcctaagaaatctcgggcagtaagtagacataactgtaacgtgaataatcataaaaaatgatgataaagtatcattcctttccgaaagaactaacatcaaaaggtccacaaatatcagtatgcacaatttcaagaagctgagtgcttcttgtagctcctttctttgtatgttctggttgttatcctttaatacaacccacacaaatatttagatccgtacaatctagataacgaagaattcatcttttataatcttt

SEQ ID NO: 19537 - DNA, 344 bp, Glycine max
agtcttctctatatgttatgctcctgaatcggtcatccgggttaaaagtcatgaccatttgaatttctcaagagcttttgttgttcaatttcgaacgtattgatgtattaagcacctgaatcggacctccgaccgaaaaattatgaccatttgaatttctctagagctctcgttgtttaatttcaagcgtctcgatatattatgcgcctgacttgtacctccgatggaaaagcgatgaccattttaatttctcgagagctcccgttgttaattttaagcgcgctatatattatgctgcccgaatctgaccctacagttaaagctatgaatattcgaatttcccg

SEQ ID NO: 19538 - DNA, 393 bp, Glycine max
gtcataactcttaactaggatgtcccattcttgcacataatatatcgagacgctcgaaattcaacaacggaagctctcgataaattcaaatgttcataactgttaactcggatgtcagattcaggcgtataatatatagagacccttaaaattgaacaacgaaagccctcgtgaaattgaaatggtcataaattttaactcagatgtcatattcatgcgcatgatatatcgagacgctggaaattgaacaacggaagctcttgataaattcaaatggtcatatgttttaactcagaggttcgattcatacgcattatacattgagatgctcgatattgaacaacggaagcttttgagaaatcacatggtcataacttttaactcagatgtcat

SEQ ID NO: 19539 - DNA, 383 bp, Glycine max
agcttgtatggcaaactggatgcattggttaacttggtaacccagctggccttgaatcacaaatctgtacctgtcgcaagggtttgtggtttgtgctcctctgctgaccatcatacagacctttgcccttccatgcagcaacctgcagcaattgagcagcctgaagcttatgctgcaaatatttacaatagacctcctcaacctcagcagcaaaatcaaccacagcagaacaattatgacctctccagcaacagatacaaccctggatggaggaatcaccctaatctcaaatggtccagccctcagcaacaacaacagcagcctgctcctttcttcaaaatgctgctggcccaacagaccatacacttcttcaccaatccaac

SEQ ID NO: 19540 - DNA, 392 bp, Glycine max
tattctttatctagagtagttgagcatccaacttactactgacatatattcgactgtagtagtggacaatgtagttgagccttgcatcttgcatattcatgttactaagttagcaccgataaagtaatagcttccactagagctttttctttcaactctatcaccaacatagtcaacatcataatagcttgcaagtctgaaactctctctatttttgaacataacaccaagattagaagttccaattaaatatctacaaatatgtttaatttcacttaggtgaacttccctttggtatttttgaaatcttgcacatagataaacattgaacataatatcacaaatggatgcagtgagatagaccactgagttgcatccactttttttgatcc

SEQ ID NO: 19541 - DNA, 422 bp, Glycine max
ttaacattaattaaaagctcactgttgtaggggcaatcacttatggtaatttttatgcatgtgactgaacttgagccaatctatatgaaataaaataaatgcattctcagggtttcgttttgctgaatgctacaggctttgcaaaacttttttgctgctttagtctattctgcaaatactagttttgattctctgctggagtcactactagcctgtgctaagccttctccacagtctggtggcattgctaaacaagctttgcattcaatagctcagtgtgttgctgttctatgccttgctgctggtgatcagaagtgttcatctactgtgaaaatgcttactgacattctcaaggatgacagcagatctaactcagtaagtctttttctccagtactcttgacgtgtagtgatattaattga

SEQ ID NO: 19542 - DNA, 423 bp, Glycine max
tcaaaatgtagttaagactgcagacaacttctgttcatgtttgaagcttgatagaaacacagatgttagctatagtaatatgaggaaggctgcttcttgggaagatttgactgacaactatttattctgttctaaagctgtagatcctcagtacaaggatttaaggcattttcagtggcattgggaaaagggggagcctgtcattgtcagcaatgtgcttgaatgtacatctggtttaagctgggaaccgcttgtcatgtggcgtgcattacgtcatgtaactaataccaagcatggccaacatttggcggagaaaacaattgattgcttagattggactgaggtttgcttaatttcccaatctttaactctattgaccatggagagctctttacacaaatttcattcttcaccttcattctc

SEQ ID NO: 19543 - DNA, 336 bp, Glycine max
tttcatgcaagcttatcaaaactgaatataatggctcctaggctcaagaatcttatactcttagactgtgagtcttgctaactaggaaaacatgttacgtcatcatttcctcaaactgtacaaagatgtaactttgctttgtctaccattcagcttgatatttggggaccaagtatggttacatcttttggttttcggtattttgtaaccttcattgatgaattttccagatgtacttgcggttatttaatgaaagacagatctgaacctttacatatattcatgtcgctctctaatgagattgagaatcaatctggcagatcaattaagattttc

SEQ ID NO: 19544 - DNA, 421 bp, Glycine max
ctgtactcaatgaagtttattcttactgtgacgagtttcatactttatatactgtttgtctcttcccttgtagtttccatagcagcagacacatcatccatttcacaatcccaatccctcagttctggaagaaccatagtttctccaaatggagtctttgaacttggattcttcaatcttggaaatccaaacaaaagttacctcgggatttggttcaagaatattccgtctcaaaacattgtttgggttgcaaacggtggcaacccaataaatgattcctttgccctcttgagcctaaacagttctggccatttggtccttacacacaacaacactgttgtttggtccacaagttctctaagagaaacacagaatccagtggcaaagctcttggattctgcgaatcttgtgataagggatg

SEQ ID NO: 19545 - DNA, 407 bp, Glycine max
  unsure at all n locations
tctatagaaggtccgttcctaatttctctacaattgcatcacctctcaatgagctggtgaagaagaatatggcatttacctggggtgaaaaacaagagcaagcctttgcttttctcaaagaaaagcttactaaggcacctattctagctcttcctgaattttctaaaacttttgagctagaatgtgatgcctctggtgtgggagttggagctgtattgttacaaggtgggcaccctattgcttattttagtgaaaaacttcatagtgccaccctcaactaccccacctatgataaagagctctatgccttaataagagccctccaaacttgggaacattaccttgtttccaaggaatntgtcattcatagtgatcatcaatcacttaagtacattagagggaaaatc

SEQ ID NO: 19546 - DNA, 349 bp, Glycine max
agctttgagtaaattgaaatgacaagaactttctacacggatgtccggttgagtcccgtaatatatcgagatgctcaaaatttagatccgaagctctgagaaaattgaattgacaataactttatacacggatgtccggttgagtcctgtaatatatcgagacgctgtaaattgaaagcggaagctcgtaggaaattcaaacgacaataactttttactccgatgttcgattgaatcccgtaatatatccagacgctcaaaattgagactacaagctctgagcaaattgcaatgacaataactctatacaccgatgcccggttgagtcccgtaatatatcgagaccctc

SEQ ID NO: 19547 - DNA, 405 bp, Glycine max
agctttcgataaattcaaatggtcataacttttcactcgcatgtccgattcaggcgcataacttatcgagacgctcgaaattgaacaacggaagctctcgagaaattcaaatggccataacttttcactcgcatgtccgattcaggcgcataacttatcgagacgctcgaaatttaacaacagaagctctcgagaaattcaaatggtcataacttttcactcgcatatctaattcagcgcatagcatatcgagacgctagaaatttaacaacggaagctctcgagaaattcaaatggtcataacttttcactcgcatgtgcgattcaggcgcatagcgtatcgagacgctagaaatctaataacggaagctctcgagaaattcaaatggtcataacttttcactc

SEQ ID NO: 19548 - DNA, 434 bp, Glycine max
  unsure at all n locations
taaggtacgatgaatttcgaggtgcaagtcattcattctcctccccaaacatactcatcccagtaactggtagaattgtaaaatatagaagcttccgaactccctgcactgtacctgcctctctgctccctagaaaacttgaacagcgtggtagcaccatgaactagtttcttcgaataggccttgttgtccttgaaaacaatggaagcagatgccaaggcagcagccatctcagctgcaagatcagaacaactatggcattcagtcacagggcggtcatagtccatgtcctctgggcgcatccagcaatagtggtcattcggactgtcaccaccggaagtatctccaagcccaacctgtcaaacaagcataaaaaaccatcattgagacacatcctactccgcaccacacaacanaattctagtccaccaacc

SEQ ID NO: 19549 - DNA, 398 bp, Glycine max
  unsure at all n locations
agctttatacgttcaatttcgagcgtctcgataagttacgggactcaatcagacatccgagtaaaaagttattgtcgtttgaatttgcacagaggttcaacattcaatttcgagcgtctcgatatgttacggggctcaatcagacattcaagtaaaaatttaatgtcgtttgaattttctcagagattcaacattcaatttcgagcgtctcgatatgttacgggactcaatcagacatctgagaaaaacgttattgtcgtttgaattagctcagacgttcaacattcaatttcgagcgtctcgatatattacgggactcaatcacacatccgagaaacaagttatggtcgtttgcattggctcagagcttcaacattnaattttgagcgtctcgatat

SEQ ID NO: 19550 - DNA, 444 bp, Glycine max
  unsure at all n locations
ntgagccaactcaaacgacaataacgtttttctcggatttctgattgagtcccgtaacatatcgagacgctcgacattgaacgttgaagctctgagccaatagaaacgaccataacttttttctcagatgtctgattgagtcccgtaacatatcgagacgctcgaaattgaatgttgaatctctgagaaaattcaaacgacattaaatttttactcgaatgtctgattgagccccgtaacatatcgagacactcgaaattgaatgttgaacctctgagcaaattcaaacgacaataacttttttctcggatgtctgattgagtcccgtaacatatcgagacgctcgaaattgaacgttgaagctctgagccaatacaaacgaccataactntttactcggatgtctgattgaggctcgtaatatatctagacgctcgaaattga

SEQ ID NO: 19551 - DNA, 435 bp, Glycine max
gactgtatattgatttctttagtatgttctctttgtgtccatttccttcaactgagaaccccattggttggtccatacaaacattcttctctaaatcttcattcagaaagggggttttcacatttatttgatgtagctccaagtcataacgggctactaatgccatgataatcctgaaagaatcctttcgagaccagtaaaatgtctctctataatgaatgtcatatttctgagtaaattccttagcaacaagtctagccttgtaacgttcaaggctgccatgagagtcacgtttagtcttgaagacccacttacaaccaactctcttacaaccccttggtaattctacaaggttgcaaacaccattatgttccatggaatctatctcttctctcatggcattcaaccacttctcagagctatcacaacttacac

SEQ ID NO: 19552 - DNA, 318 bp, Glycine max
tagcttgttggagcacgatgggagctgatatttgtgaaggcattcaggaatttcatggcagcgcatcattgcctaaaggtatcacttcatcatttactactcttatccctaaatttgagcaatcgtaaagcttgtcggagtatcaccctattttactcataggtggtcttcataggatcatttcgaagactctggcccatacaatgaacgcagtattacctactattatatctccgcaacaaatagcctttttacccggaaggaaaatccatgatggtgcggctgttatcaacgagttggtggattcgcgaaaaacga

SEQ ID NO: 19553 - DNA, 397 bp, Glycine max
agctttagccttaggttgttccatgttgctgctccccttatctttaacagtaacaagcacatttccattcacaggtttagcgacatcaacatcatcacttgagccctcactttcaatgtttccattatccagtaatatcatgcctcttttatttggacattgagaagcaatatgaccaactccttgatacctgaaacatttgatatcatgggatctagaagatgaattaatttccattttacctttaggtgcagcaaatgaatttttggacttagcttcatcttttgactttgtcatagattttttgttttgccaatttgaccttcatgaataagtggaatcaaatttggaagtactcttagctctcaattgcctctccacttgaatagatttatgc

SEQ ID NO: 19554 - DNA, 443 bp, Glycine max
  unsure at all n locations
gtgcttgagcccactctgactcttctaggcctgactccgtcattatcctctgagaaggaacttctacctcaaatgggagtactgcctccatcccataaaccaaggaatacggtgttgccccagtagaagttcgcaccgaagttctgtacccgtgtagggcgaaaggcagcatctcgtgccaatctttgtatgacaccgtcatcttctgaacaatcttcttgatattcttattcgcagcctctacagccccattcatctttgaccgataaggggtagagttatgatgctggatcttgaagtcttcgcacatctcctgcattatcttattgttcagattggtgccattgtcagtaatgatcttcctgnggagtccgtatcgacaaatcagctccttctttatgaatctaactaccacattctttgtgacattagtataagaagcg

SEQ ID NO: 19555 - DNA, 376 bp, Glycine max
  unsure at all n locations
ggtcattagaaccaatgaactcactgacaatctccttggacagaaccttctctcgaatgaaatgacaatccatctctatatgcttagtcctttcatgaaagactgggttcgaggcaatatgaagagcatctcgattattacaatacaacttcatttgcaactcttcacaaaacctcaattcttgcacaaattgtctaatccacatgagttcacaagtaactatacccatcgatcgatattcagcttctgcactaaaccgacctacaaccgtctgtttcttgcttctccaagaaataagatctcctccaatgaagacacaatagcctgatgcaaacctnctatccatgggacagccagctcaatcagcatcacaata

SEQ ID NO: 19556 - DNA, 443 bp, Glycine max
agatgttaggtgatgcaatcctaccccgcaagggcattggatagaaaacttcaagtagattgggccaaagatgcaagagaaggccctagggttcttatgagccttatggtagatttcgggcccatgggctaagtatgagcccacttatctttgtaaatattagattaaggtttcattatttttgggccttgtatttagggctccataatgtaggtagggtaccctagaaatataggatttttcagcccttgtatttaagggcacctagactagtttttgtattacgggtagttttgtaatttcacatgtactaagtggatatttgatgtgtgtggttggaaataaatttaattgaattggtagaagcccaatccaattaaattttagagggggaggtgagcatttgcttactacaccccattgccacatcatatagttacact

SEQ ID NO: 19557 - DNA, 341 bp, Glycine max
  unsure at all n locations
agctttatcacttttcacacagaggtcagattcgggcacataatatgtcgagatgctcggaattgaaccacggaagctctcgagtaattcaaatggtcataacttttcacacagatgtccgattcgggcgcataatatgtcgagtagctcgaaattgaacaacggaagctgtcgagaaattcaaatggtcataatttttcacacggaggtcacattcnggcacataatatgttgagatgctcggaattgaaccacgaaagctctcgagaaattcaaatggtcataacttttcacacggacgtccgattcacgcgtatcacatatacagacgctcgaaattg

SEQ ID NO: 19558 - DNA, 426 bp, Glycine max
  unsure at all n locations
acagcttgaatcggacctcagtgtcaaaagttatgaccatttgtatttctcgagagcttccgtggttcaatgtcgagcatctcgacatattatgtgcccgaatctgactttcgtgtgaaaagttatgaccatttgaatttctcgagagcttccgatgtttaatttcgagcatctcaatatattgtaagcctgaatcggagctcagtgtgaaaagttatgaccatttgtatttgtcgaatgcttccttggttcaattccgagcatctcgacatattatgtccccgaatctaaccttcgtgtgaaaagttatgaccattcgaatttctcgagagcttccgttgttcagtttcgagcctctcgatatattatgcgcncgaatcggacatccgtgtgaaaagttatgaccatttgaatntctcgagagct

SEQ ID NO: 19559 - DNA, 420 bp, Glycine max
gtctaaattgacgctttagatcatttttattatgctttgctgagcaacatcttcaaaattgtgattaggacatttcctcagcaatgatttgaattactcctatacttcacaaaagggttcttttgatcctttcctgaatgtagaaatatctgactttacattgatatacctagatggagggaaaaatctatcaagaacttttcttccactatgctccagcttgtcaaactttgatttggatgagattgtagccatgctttggctttccctgttaaagacaatggcaataatctaaggtacacaacctcctcttcacctttaggaatgcccattgtgccatattgttcatagaaagtagatagatgagtatatggatcctcattaccagcacttgcaaactgatgtgcactgatcaaactt

SEQ ID NO: 19560 - DNA, 397 bp, Glycine max
tttcttattgagtaaaataaagcccaaagagcaggaataattaaggaaatcagagctaattgagaaaagcaagctaattgaggaaagaatggctaattgaggaaagcatggctaattaaggaaataagattaattaaggaaagcaaagttaataaaggaaagaagacttattaaggaaagtagaataattaaggaaaccataattaattaaggaaagtaaaggcagacttggtgtaaaaagctcactaatctgcacctataaaagaaaaagagaaaagaaggagaagacacatagaaattccaagagaatataattcctcatagaacgaaaaggctagaagaaggagaagcaaacaataggagtcattccttccctctatctcctttcttatctttt

SEQ ID NO: 19561 - DNA, 433 bp, Glycine max
ttgatgcaacatttggagaggttaatgaaacatcttgttgatgcgctccatgagaggttggatcaaatggagaatagagatcataatgaagaagaaaggaggagaagagggaatgatggtgttcctagacaaaaccgaattgatggtattaaactcaacattcctccatttaaaggaaagaatgatccggaggcctacttggagtgggagatgaaaatagagcatgttttctcatgcaacaactatgaggaggaccagaaggtgaagcttgccgccacggagttttccgactatgctcttgtgtggtggaacaagctacaaaaggagagagcaagaaatgaagagccaatggttgatacatggacggagatgaaaaagatcatgaggaagcggtatgtgccggctagttactcaagggacttgaaattcaagc

SEQ ID NO: 19562 - DNA, 412 bp, Glycine max
acatctagaggtgctttccaatctgttcttttaccacttattctgccttcttttattttcagagtgggaatgcctctgacagcacctttgtcaatgattttcttcatgcctcttaagtgcagatgtcccaatctttgatgccatattctgacttcatcttctttggaggatagacatgtggaggagtaactgctttcttgacgtgtccatacgtagcagttgtcctttgatctgctgcccttcattagaacttcactcttctcatcagtcactaagcattctgactttgtgaagcttacattgaatccttcatcacacagctgactgatgctgatcaagtttgcagtcagtcccttcaccagcagtactttgtccagactatgaagtccatcatggactaactttcccattc

SEQ ID NO: 19563 - DNA, 397 bp, Glycine max
  unsure at all n locations
agcttagactaaatgtacctaggtacgttggcgatggacaacaaaaagcgagcagtcatggtcgtcagcgcgatggagaaagcttagatgcagaacacggagaagaagagagcgcgagcaatgtaggtcgtgtatgatataagttaaaatgtaattccaacatcgattttcaatacaaaaccgatgttaacaaaatgatgttaacgttaacatcggttttcttctanaaactgatgttaactgatcatatgttaacatcgatgttcaaaaaaccaatgttaacgaacataggttaacatcggttttcttcaaacccgatgttaactaagagacattaacatcgattnttccaaaccgatttaacaaattaatgttaacatcaatcttacaagaatcg

SEQ ID NO: 19564 - DNA, 399 bp, Glycine max
  unsure at all n locations
tactcaagcttgttgatgagactctgagacggaggaatctctttgattctgttttattatgaccatgcaacagtatgtatgtttaagagggatatgatatttttacattgagaaattaaaaggtcatctgattttgttgggtatattagaggtcaggtatacaacaatataaaatcgatttgttgattttatgtcaagtaaatcctgtgtggatagggaaagcctttctgaatacctacttgatcaccacatccatctttanaaggaaaattagttgcgctcaaattttcagagatgacattatgctctgtgattatctttttcattgattgaaagtcactaatgatatatttcatatcctttatttatgtctattaaatgctgatgacgttttgccgt

SEQ ID NO: 19565 - DNA, 373 bp, Glycine max
  unsure at all n locations
gcctaattcgtctaagagctcgacagcggcgggcattggatatcgatcacgcaccgngatngcatttaaagctctgtagtccatgcaaaagtgccatgaaccatcctgcttgcgaactacgagcacagacaagacgggtcctttctagagcattgatccaacctgcgattcaatctcatgtttctggtaatgtggataacgatagggccgtacgctgactggcgcaccttgcttcatgatgtgaatgtcgaggtctgtttcgcgggccgtcgtcatctaataacggggctcaaataatgcacgaaaatgatcaattcaagattggatacgtgcgtggggagacataccactctgcggtgcgttttctaccact

SEQ ID NO: 19566 - DNA, 428 bp, Glycine max
  unsure at all n locations
ccgcttaaacattcaatttcgagcgtctcgatatattactagattatatcttacatccgngtaaaacgttattgtcgtttgaattcgctcagaggttcaacatttaatttcgagcgtctcgatatattacgggccttaatcagacatccgaatacaaagatattgtcgtttgaattggctcagaacttcaacattcaattttgagcgtctcgatatatgataggactcaatcagacatccgagtaaaaagttattgtcgcttgaattgtcttagagcttcaacattcaatttcgagcgtctcgatatattacgggcctcaatcagacatccgagtaaaaagttattgtcgtttgaattggctcacagcttatacattcaccttcgagcgtctcgatatatgacaggactcaatcagacatccatgtaa

SEQ ID NO: 19567 - DNA, 404 bp, Glycine max
  unsure at all n locations
acctccttaacnttagacccaaaatagccacaacagaacaattatgacctctccagcaacaagtacaatcctgggtggaggaatcatcccaaccttagatggtcgaatccttcacaacagcggcaacaacaacaacaacaacaacaaccttattttcagaatgctgctggcccaagcagaccatatgttcctccaccaatccagcaacaacaataacagcaaacagatgaggcccctccgtaaccttcccttgaagaacttgcgaggcaaatgactatgcaaaacatgcagtttcaacaagagaccacagcctccattcagagcttaactaatcacgtgggacagtcggctacacagttcaatcaacaacagtcccagaattatgatagattaccttttcaatc

SEQ ID NO: 19568 - DNA, 369 bp, Glycine max
agttctagctgtctaggaacttagacgttgatgaactttgttcaacataaattgagaagtattcctagaagccatcttatgaaagatagacactccgaggtactttcccagatccttagtccacgccatacccatttgtccacttagttgatccttgactcgagcctccacatttttggaaaagaacattcaacatttctccaacctaattttctgcttacaactcttgcaaaacaaattccaaatattcctgattgaatggacctgctccactaaagccttcataaataaaataaggtcccatgcaaaggctaagcgagatataactggaccatgtctcacaagacgaatatggcaccatactctttg

SEQ ID NO: 19569 - DNA, 386 bp, Glycine max
  unsure at all n locations
agcttctatagaaggttcgttcctaatttctctacaattgcatcacctctcaatgagctggtgaagaagaatgtggcatttacctagggtgaaaaacaagagcaagcctttgctttgctcaaagaaaagcttactgaggcacctgttctagctcttcttgacttttctaaaacttttgagctanaatgtgatgcctctggagtgggagttggagctgtattgttacaaggcgggcaccctattgcttattttactgaaaaacttcatagtgccacccttaactaccccacctatgataaagagctttatgccttaataagagccctccacacttgggaacattacccttgtttccaggaatttgtcattatagtgatcatcaatca

SEQ ID NO: 19570 - DNA, 434 bp, Glycine max
  unsure at all n locations
gctcagtgggtcagttatttaatactggtgcaaaaatntatttttatatattctgaatgaatgagaaatttagatgctaacaaaattaatatcattcctaaagaaattattaaaaattcaacgtgacaaaacagatcatgcaaaaagcatttcaataataataataataggtagataatatagataatagaagatttgtcaccaattaaaataattacatacaatataatcaattgaaaacataattattaatcaaggtaacataattgtatgcacttagtttactatttaaatggattgattgatttgttaaaattttattttaaagtaatcaaaaataaattgtaacatttattattttatttttttgaatttgaactaatttgaattaactaattaaaatagaattaatgacacttagctaatgctgaatg

SEQ ID NO: 19571 - DNA, 438 bp, Glycine max
  unsure at all n locations
ccttaatctctttgtcaacacaaaaacttcccgtgcaatacttcatttattaacgcgttgccgagggataaacacatctaaagtaaggtgttagattatatgataatatattctgattttatataattcttatatctattagatttatctttagtcatatctttagctattaggtttatctttagttntatagttgttatatctattcgatttatctttagccattccattagatttatctttagccatatctttagcttatatatctttagcttgtaaccttatatataagagaatggtgcttaatgaattattcaaggaaacaatttctttcatggtatcagattgcttaaggaaatatttttgaaccttcctcagccttccgcacacaggccctagcgtcgtttagcccctttcttcttcttctccccttcttct

SEQ ID NO: 19572 - DNA, 330 bp, Glycine max
  unsure at all n locations
tttcttgtagcaaactggatgcattggttaactcggtcacccaactggncttgaatcacaaatctgtacctgtcgcaagggtttgtggtttgtgctcctctgctgaccaccatacagacctttgcccttccatgcagcatcctgcagcaatcgagcagcctgaagcttatgctgcaaatatttacaatatacctcctcaacctcaacatcaaaatcaaccacatcacaacaattatgacctctgcagcaacagatacaaccctgtatggacgaatcaccctaacctcaaatggtccanccctcatcaccaaccacagcagcctcgctctt

SEQ ID NO: 19573 - DNA, 380 bp, Glycine max
  unsure at all n locations
tgcttctggtgggacatcttgacttgctttccaatctgacattcaccacagattctgccttcttctattttcagattgggaatgcctctaacagcacctttgtcaatgattttcttcatgcctcttaagtgcagatgtccaaatctttgatgccatattctgacttcatcttctttggaggatagacatgtggaggagtagctagtttcttggggtgtccatangtaacaattgtcctttgatctgctgcccttcattagaacttcactcttctcatttgtcaccaagcattctgactttgtgaagtttacattgaacccttcatcacacagctgactgatgctgatcaagtttgccgtcagtcccttcaccagcagtac

SEQ ID NO: 19574 - DNA, 439 bp, Glycine max
  unsure at all n locations
cttgagcaattcanatggtctgaacttttcacttttagttctgattctggcacatcacatatatagacgctcgaaattgaacaacggaagctctccagatattcaaatggtcataacttttaacttggaggtccgattctggcacataatatatcgagacgcccgaaattgaacaacggaagcacttgagaaaatcaaatggtcattacttttaactcgaaggtccgattcaagcacatcacatatagagacgctcgaaattgaacaacggaagctctcgagatattcaaatgattataacttttaactcggaggtccgattcaggcgcataaaatatagaaactgtcgaaattgaacaatggaagctctcgagcaattcaaatggtcataacttttcattcggaggtctgatactagcgcatgatatatcgagacgct

SEQ ID NO: 19575 - DNA, 382 bp, Glycine max
agctttgtgtagaagaatgatggataatcttgatccaatcaaggataactattttctaaaaaaggcaagaaagagactgagactttctgatgtagttgttttctcaaaatcacatatttgaccctattttctttggtaactcattttctaattactacctaacaaatattttgaaagaaaataactcttaatatacgcgggataggagcaggtaaatccatattaaaaagctgcaaaatttggcaaaggatacatccagatcttatgcgatcgagttctccattgaaaataatcactttccgttcagtgttcaagaccgcctctttataaagttcttccacaacaagtatttctgaaatacaagggagcagtaatcatgata

SEQ ID NO: 19576 - DNA, 419 bp, Glycine max
  unsure at all n locations
cttaagtcacctgcggcatgcaagctttcattcccccaccattccctccgtattgttttttagtagattttccaccacccttgctcccgtaactccatggttcagacaatgtagaccaagcataaacatcaccaccccagtttgtcttgttattttttaaacaagatgcaccacgcccaccatgccctccaccagctccatcgttgccaacaggtgtgccactattttgggaaggtggagaccctcctaaagatgatgagtctatataagaattgtatcccattgtcagattggctgcaaataaaaccacagagccagaaacaatggatgcatcttgaccaagtctaacgttgccggatacattgactgttatcatacacccttncatgggacataaaagtgacacatcagagagtatc

SEQ ID NO: 19577 - DNA, 382 bp, Glycine max
atattatttgttctaatcggacatcctagtcaaaagttattgtcgtttgaatttgcttacagcttcagctttcaatttcgagcgtcttgatatattacggggctcgatcagacatccgagtaaaaagttattgtcgtttgacttttcttacagctcccgttttaaattacaagcgtctcgatatattagagggctcaatcggacatcccaataaaaagttatcgtcgtttgattttcctaacagcttccgttttcaattacgagcgtctcgatatcctacgggacacaatcggacatccgagttaaaatttattgtcgcttgacttttcttagagctatcgttttcaatgtccagcgtctcgatatattccacggctcaatc

SEQ ID NO: 19578 - DNA, 430 bp, Glycine max
gtatttatgaaacaactttgcttgtaattctttttcttataattttatataacaaggggcatttgaaattatttatttgaggttataaaagtgactaatgaaatttctataagtttttcattgtattggaccttagatgtaacaaaacttttgttttgggtgcctgtcaagtagtaagtaacaatgtagtgtcatatcatcacttagttgacgataaagattcaacaaaagttttgatatatcaagacaataatgtaaccaaaaaatttattgaagacccaaaataaaaaattgtcatttatcatgaatttcacacatatttaatcttttcttttatttacaagagtttcacgttcgaatttattaataagctcttatttaataacattctattgaataggtgcttcattaacttcgttacctcaatatt

SEQ ID NO: 19579 - DNA, 428 bp, Glycine max
tgaatttacaacgttccaattgatttcaaaatgttgttattgattacaatgatttggtaatcgattaccagtatgtttgaacattggaattcaaatttaattgtgaagagtcacatcctttcacaaaaaagctttgtgtaatcgattacactgatttggtaatcaattaccagtgatagtttctgaacaaaatcaaaagatgtaactcttccaatagttttcaagtttttcttaaagtcataacttttccaaatggtttttaagtttttctaaaggttataactcttctaatggtctcttgactagacttgaagagtctataaaatcaaggctctgatttgcattttatttaaaaaatattcattcattctttagacaacaaacttttgccaattgctttctgaatatctttgaactccttcttcttc

SEQ ID NO: 19580 - DNA, 387 bp, Glycine max
  unsure at all n locations
agcttcaacatcagaccacttccagggtgctggaactacttcacatggatttgatggggcctatgcaagttgaaagccttggaggaaagaggtatgcctatgttgttgtggatgatttctccagatttacctgngtaaactttatcagagagaaatcagaaacctttgaagtattcaaagagttgagtctaagacttcaaagagagaaagactgtgtcatcaagagaatcaggagtgaccatggcagagaatttgaaaacagcaggttcactgaattctgcacatctgaaggcatcactcatgagttctctgcagccattacaccacaacagaatgggatagttgagaggaaaaacaggaccttgcaagaggctgctcgggtcatgc

SEQ ID NO: 19581 - DNA, 392 bp, Glycine max
tcaacattcaatttcgagcgtctcgatatatgacgggttctaatcagacatccgagtaaaaagttattgtcgtttgaattggctcagagcttcaacattcaatttcgagggtctcgatatattgcgggactcaatcagacatccgagtaaaaagttattgtcgtttgaattggctcggagcttcaacattcaatttcaagcgtctcgatatatgacgggactcaatcagacatccgagtaaaaagttattgccgttggaatggcttaaaaggttaacaattaaatttgaaccgcctaaatatattacggaactcattcaaacttccgagtaaaacgttattgtcgttggaattgcctaagaggttcaacattcaatttcgagcgtctcgata

SEQ ID NO: 19582 - DNA, 350 bp, Glycine max
tgcttttgctagttggaatcatttatcctatctccgacagccaatgggtgagtctcgtccagatagtcccgaagaaaaccagcctcaccgtgatcaaaaatgagaaagaggagttgattcctactcgggtgcagaacagttggagagtttgcatcgactataggagactgaaccaggttaccaaaaaggaccattttcccctgccattcattgaccaaatgcttgaatgccttggaggtaaatctcactactgcttccttgatggtttttctggttatatgcaaatcactattgcccctaacgatcaggaaaaaaccacattcacttgccctttcggcacttttgcctat

SEQ ID NO: 19583 - DNA, 430 bp, Glycine max
  unsure at all n locations
taatgttatatctgactgctgggaagagtgctaagatcttagtgctcangcttatgctcacattcagtgtcaagatgaacaaaggctctctcaacttcagggagttcttcgatccttatctgcaatgattctccaattgcatgtgcttctttcagtggaagatcctccggtagttctatgtccacctgtttatgtccaacatggatacgaatttcaaattagtttatatcaaattccctttaaatttgttaacatcaaatgtgttttatgttaatacatatcacatggagattggttaaagcacatggtcctacatcacataagaagttccttctttattgagaaaaacatgttttaagttcctaaaataggataaattattatataatntgcgaccaanattatatattccgaactagctntacataat

SEQ ID NO: 19584 - DNA, 426 bp, Glycine max
  unsure at all n locations
tatcctgcaaacatttataatagaccccctcagcagcttaaccaacaacagcagaataattatgatctttcaagcaacagatacaatccaggttggagaaatcatccaaatctgagataggcaagtcctccacaacaacaacagcctgtcccttttttccagaatgctactggtccaagcaagccatatgttcctcctccaatgtagcagcagcaacagcagcagtcacaacaaagacaataagcaactgaggctcctcctcaaccttccttagaagagttagtgaggcaaatgaccatccagaatatgcaatttcagcaagagacaaaagcctccattcagagtctgacaaatcagatggggcagatggctactcagttgaaccaagcttagtccanaaattctgacaaatggccttcacaaact

SEQ ID NO: 19585 - DNA, 222 bp, Glycine max
tttttctggtgggacatcttgacttgctgtggagtgtgacattcaccacatattctgccttcttctatttttatatcgcgaatgcctctaacagcccctttctcaatgattctcttcatgcctcttaagtgcacatgtcccgatctttgacgccatattttgacttcatcctctgtgcacaatacacatgcggaagactgactggccccttcatgcgtccat

SEQ ID NO: 19586 - DNA, 385 bp, Glycine max
agcttctaacgggcatcacttcatcttggttgcgatcgactactttaccaaataggtcgaagccgcctcatactctatcgtcacgaggaatgtggttgctacgttcatcaaaagggagataatctattggtatggatcgcccaggaagattatcacaaacaatggcaccaatctgaataacaaaatgatgaaagaaatgtgcgacgagttcaagatccagcacggcaattccacgccttactagcctaagatgaatggggcagcacaggcggccaacaagaatatcaagaagattatctacaacatgactctgtcatataacgattggcatgaaattcttcctttcatgctgcatggctatcgaacctcggtacacacatcaatc

SEQ ID NO: 19587 - DNA, 433 bp, Glycine max
tcctcgtggcttctttgagaagctttcacaagaggcttctttgagaagctacatccttatctatccacccctctattaactaaattaacttccttaaaaataattacggatgaaaataacgcaacaaataatcaaacatcaaacataattactaataatatatagatatatatatatcagggtgttacaactctcccacccttttagaaatttcatcctcgaaatttaccttactcaaacaaggatgggtgagcttctcgcatctgaatttctaattcccacatggcatcttctcctgatgcacctccccatatcaccttgaccaacgaaatctctttccctcttaggtgttttgttcgccaatcctcgatcctcaaaggcaatatttcatatgtcaaattctccttcacttgtacatcatccaattcaatca

SEQ ID NO: 19588 - DNA, 431 bp, Glycine max
  unsure at all n locations
taactaanattaaatatattaaaagatttggcatatactatcacttaaacgttgaaattacctccattagtatagttttcgttcaacagaaattaaactagtaatatagtcattatagatctacaatgagttctttggatttttgttttagaatattaggatttaaaaccaactaattaaataacaatcataggtttcatttacaatttatatatgtaaacaaattaattattagatcaaaattaattgtcataaaatttattatataaattcagatgtactttgaatatacataagacattgtagtcttatatatagcgacattaattattttataacataattagcatattagttcggttgattagagcgaatgcaaaagtcacaggttcgattcctgcattacccattaattctagattcacttatga

SEQ ID NO: 19589 - DNA, 434 bp, Glycine max
  unsure at all n locations
tggatttccttttagtagggaatctatccttcctaagatggagcctaacccaatcaccctcattaagaattagctcttttcttcctctattgcctttagttgagtacaccgttgttcggttctctatttagttcttaaccctctcatgcaacttctttacaaactcttacctagattccccttctttatgtataaaaaaagtgtccagtggaaggggaatgaggtctaacggcgttaggggatggaacccatagacaacctcaaaaggggattgcttggtggttctatgaacccccctgttgtatgaaaattctacatgaggaagatcctcatcccaagacttatggttgcctttcagaagagcccttanaagggtggataaagacctattcactacctttgtttgcccatcagtttgtggatgacaagtggta

SEQ ID NO: 19590 - DNA, 396 bp, Glycine max
tgcccttctgatccgaagaggctgacccttgcggagcccgtcgagagcgaaattgacctcgtcaacgtgctccatcatctctccgaactcctgcgcctccatcagcgtcgacgtcgccggaatcccctccgccggcgcccgcttcgccctcttcgactcccttgctccgcctgcgccggtgccgtttccgaagtcgccgatctccgaatcgaagaaggaccaatgctgcgaggacgagtcctgtgaggagaacgcgaagccgcagagagggtcgtcaatctcctgagataaggaatccctgaatggctccgaaacgtcgtcgtttagagaggacgagcccgaatacgttcccgagagggttcctttgcggcggccgtatgtgcggacgatcatctt

SEQ ID NO: 19591 - DNA, 375 bp, Glycine max
  unsure at all n locations
agcttatcccaagaggggatggacctttttgatgcaatcctatgccgcaagggcattggatagaagaccccaagtagaatgggccacagatgcaagagaaggccctatggttcttatgagccttanggtagattctgggcccatgggctaagtacgagcccacttatctttgtaaatattagattaaggtttcattatttttgggccttgcatttacggctccataatgtacgtagggtaccctagaaatatangatttttcagcccttgtattttacggcacctagactagtttttgtattacgggtagttttgtaatctcacatgcactaagtggatatttgatgtgtgcggctggaaataaacttaattgaa

SEQ ID NO: 19592 - DNA, 428 bp, Glycine max
ttctccactaagttgcctaatgcctgaaatgtcttctctaatggcaatggtcctagatgcagggaagaatttttccatgaacaccctattaaggtcatcccagctgaaaatagacctgggagcaaggtagtatagccaatcttttaccactcccttcagagaatgaggaaaagcctttagaaagtcatgatcttcttggacatcagggggcttcatggtggaacaaacaatatggaactccttaagatgtttatgaggatcttcacctgcaagagcatgaaacttgggctgcaaatgtattagtccagtcttgagaacatatggaacaccctcatcagaatattgaatgcacaagctttcataagtgaaatcaggtgcagccatctccctaagaatcctctcacgaggtggaggttgatccatgttct

SEQ ID NO: 19593 - DNA, 395 bp, Glycine max
gcctctcgacatattatgcgcccgaatcggacatccgtgttatatgttatgaccattcgaatttctcgagagcttacgatgttcaattccgagcgtatcgacatattatatgcctgaatcggacctccgtgtgaaaagttatgaccattcgaatttcccgagagcttacgttgtgcattttcgagcgtctctacatgtgatgcgccttaatcgaacatccgtgtgaaaagctatgaccatttgaatttctccagagcttccgttgtccaatttcgagcctatcgatatgttatgcgcccgaattggaccttcgtgtgaaaagtcatgaccatttgaatttcactagagcttacgatgtttaatttcgagcgcatccacatattatgcgcctgaat

SEQ ID NO: 19594 - DNA, 428 bp, Glycine max
tgctaacccatggaagctcctaatatctcccacactttttggggtgggccattcttggatggccttgattttctcagggtccacttggaccccatttctaccaactacaaaacctaagaaaactatattatctacacaaaaggtacacttctctatatttgcatagagggtgttcttcctaaggactgaaagaacttgtctgagatgtcctaagtgatcatctacgctcctactatacactaaaatatcatcaaaataaacaactacaaatctacctatgaaatcccttaagacatgatgcataagcctcataaaggtgcttggtgcattagtgagcccaaaaggcatcactagccattcatacaaaccaaacttggtcttgaaagcagttttccactcatcaccctttttcatcctgatttggtgat

SEQ ID NO: 19595 - DNA, 426 bp, Glycine max
tatcaaggagtacgactagatcctcgttgtgaatgctgacaatgtgggatcgaaccagctccaaaacattcacaagggtctctgcaatgactctgtcatcctcatggggaaggaaattcttcttttaggtgcatgataaaaaggtatggagttccaagtgggaaatacaagttttataggtgtgcctagcagtggataaacaaccattgtatcttaatagcagctgctcgaggcatatgataggagacaaatcaaatttcttgcctctaaaagctaaagaaggaggatttgtaacctttggtgacaacaacaaagggagaattctcagatacctctttatgatgatgatgatgtaagaagtcctaaagaatcctctcctacaagtgaaaaggtagtgaacaataacccttttgaagaacacccact

SEQ ID NO: 19596 - DNA, 330 bp, Glycine max
  unsure at all n locations
atctttttgtattccatatatagacccattaagcgtgcaaaccacatgctccccactatcacacgataaaccttcatgttgtntcatataaacctcctcctctaaatcaccattaagaaaagctgctctcacatcaatttgccgccactcaacgtcaaaatgagcacctactgccaagattatacgactagaatctttcttacatactgcacaaaaagtctctttgtcatctattccttgcttgcgagtcaatcccttagcaacaactcttgccttgtatctcctaatgttgcctaatgaatccttttctggcttaaagacccacttaca

SEQ ID NO: 19597 - DNA, 393 bp, Glycine max
agcttgaaggtatgagacgatgagtggagtgagagggagagaaggagcacgaaattttgtgcctcaaaagaggtctgaactttgaagtgtaattctcaaatgatcaaagttgaaaaaattcacacacatggcctctatttatagcctaagtgtcacacaaaattggagggaaatttgaatttctattcaaatttcacttgaatttgaaattgaatttgtggagccaaattttggagccaaaatttcactaattatgattagtgaatcttagttatggttcagcccactaatccaagatcaagtccaagattgtccactaagtgtgctttggtgtcatgaggcatgtaaagcatgaaggacatgcacaaagtgtgactatatgatgtggcaatg

SEQ ID NO: 19598 - DNA, 337 bp, Glycine max
agcttatgtgtaactactcttgatattttttaggctatgtgtttaaatttttttaaaacaaagtagattcagaaaataattacatttattattattttgattaacttctgaatatggtgtaaatcttatgtgtgtctgacatattaaacaagttaacgtctaatttatttgattagaatatgaatctgtctaaccaaattaagatgtttaataagtaagtttatttaagtattttatacttcatagcttgtaaggcattacttatatatcgcatataggttcgcaactctctttttatacttcttatcattactattttaatacaccttcctcttat

SEQ ID NO: 19599 - DNA, 410 bp, Glycine max
  unsure at all n locations
tgaggggggttttaaattaatgggtgtgacttatggttattaaatggttatgttcgactcggatgctaaccgatagaacgacatcaatggaagaccgtggatgatgttcgattattatctnatggttcatccatggacttcaaaatttgtggtgacagaagcaacaatagaccaaaccttggcttggatccgttttccaagtctttggatggtctatcatgatgagactgtattactgaccttggcatcaactattgcaacacccatcaaggttgatctaaacatcttgaatatgcataggggaaagttcgtgcgattatgtgcataaattaatctcaatgtccttgtcgtgggagattttgcatcaatggaaatcggtataatatagaatatgacgcgcttcatattct

SEQ ID NO: 19600 - DNA, 381 bp, Glycine max
  unsure at all n locations
agcttcttgttttttgcattaaacgacaagaaaagatactagtatatgaatacatggctaatggaagcctacactcctttatttttggtacgtaatatgaagaatgctttcataattcgattaagtggacttgcatgtttgcttgtttggtttgctttttaattccagtcacaattagcggctctttaatcttgaatatcttatattgaatgaatagcttgctttgtcaaatcacagataaaataaagggtaaatttctggattggcctcgacgcttncacataatatttggaataactcgaggacttctgtatcttcatcaagattctcgattaacgattatccatagagatctcaaagcaagtaacgttttacttgatg

SEQ ID NO: 19601 - DNA, 436 bp, Glycine max
tgccttgccccttgatatatttgagggactcatggtcactatgaatgacaaattccttgggataaaggtagtgttgccatgttttcaaagcccgtactaaggcatacaactccttatcataagttgaatagttaagggtaggaccacttaacttttcactaaaataagcaattggatggccttcttgcatcaacacagccccaatcccaacatttgaagcatcacactcaatttcaaaagatttttgaaagtttggcaacgcaagtatgggggcattagttagcttttgcttaagaacattgaaagcttcttcttgtttctctccccatttgaaaccaacatttttcttgagcacttcattgagaggtgctgccaatgtgctaaaatccttcacaaatcgtctataaaaacttgctaagccatgacaactcctcac

SEQ ID NO: 19602 - DNA, 423 bp, Glycine max
  unsure at all n locations
ctgttgcgaaggtgcccaaaccgtaactttgatgatgctgcacaactgcatatcttttatagtggttcgaaacctcaaaccaagatgatccttgatgcctcagctggaggcactatgatgtccaagagttcggaggaagctattaatgtaatctccattggagcttgtaggactaggatattcttcatcaatggattcctttgcttcttggaagatgaatgtcagcggaatggagaaggaagagagagaggagacgccacttcaaggagaagatgagtctagaagaagctcaccaccataagaggccatggataacagcgtggaggaagaacgagatgaatgaagggagagggagagaagagcacgatattttgcgctcataaagagctctgaaatctgaagtttaatattcanatgatcaaa

SEQ ID NO: 19603 - DNA, 431 bp, Glycine max
  unsure at all n locations
tctgaaggctcaagatacaatgaaaaagtatgttgtctttctttgtagggatgtggcctatcaacccaatgattgggtcctggtgaaactcaaaccccaccgataattaactgccaaaggacctggaacaagttcgggtaaacaggacaagctgttttatggctcattcagagtgatagaacgcattggggcggcggcttatcggctccagttaccagacggtgctaagatacattcagtcttccattgctctctgcttaagccattcaagggttcaccaacacaatctgaaattgcatccttaccagcacaattcattaatggacaacctatgatttctcctctcgctatcctcaatgatcataaggttccaggatcaacaccagactcctgngaagttctcgttcaatggcaaggtatgtcaccagata

SEQ ID NO: 19604 - DNA, 433 bp, Glycine max
  unsure at all n locations
tctatagaaggttcgttcctaatttctctacaattgcattacctctcaatgagctggtgaagaagaatgtggcatttacctgnggtgaaaaacaagatcaagcctttgctttgctcaaagaaaagcttactaaggcacctgttctagctcttcctgacttttctaaaacttttgagctagaatttgatgcctctagagtgggagttggagctgtattgttacaaggtgggcaccctattgcttattttagcgaaaaacttcatagtgccacccttaactaccccacctatgataaagaactttatgccttaataagagccctccaaacttgggaacattaccttgtttccaaggaatttgtcattcatagtgatcatcaatcactaaagtacattagagggcaaagcaagttaaacaagaggcatgcaaaatg

SEQ ID NO: 19605 - DNA, 393 bp, Glycine max
  unsure at all n locations
agcttgtaatcgattacacaaggcttgcaatcgattaccagaagtttttgaacgctctaaaacagcctttagaaatttgaatttaaattttaaagtctgtaatcgattacagaatgtatgtaatcgattaccagagttaaaattcaaatttcaaatgtgaagagtcacaactctgcagaaaacaattgtgtaattgattacaccattttggtagtcgattaccattgaagaattttttaaaataactcccaatagtcacatcttttcaaatgattttgaatggccatcaaaggcctatatatacgtgacttgcgacatgaattttctgagagttcttctgaactganatgtcttatcctctacaaaagattcctcgtctaacacttgatattc

SEQ ID NO: 19606 - DNA, 373 bp, Glycine max
ttcaaaatatggctgcagcttttggcttttccaaacttgcaggtactactatatttattgtattctagtgtcaagaatctcataattaaatattttctcatcttatgccacatatataactaatggggatggtcatttgtatttggtaataagactcaacaggtgtggcaaaagttgtaggttaaggtggacgaactacttgaggcctgatattaaaagagggaaattttcccaagaagaagaacaaacaattctggatctccatgctgtccttggaaacaagtaaatattcaacaccactatagcacctactatttaatgtgttttgatgttaattatatccttaattaaaagactgctcattattatggat

SEQ ID NO: 19607 - DNA, 435 bp, Glycine max
tgcagcacactagcaaacgtagaattatttggaacattagatgtttgcctcattcgacaaaacaactccaaagcctccctacttttatcactctgagcataccgcgctatcatgagactccaaggaataagatcatctttcggcatttcttcaaaaaactgctgcgtctcagcaatctctccagacttggttaacaattcaagcagcacagtgccaacataaagatccctatcataacacgctttcaaagcacatccatgaacacttttcccaacctcaaaattgttcggtctaaaccccataaccctcatctggcagaaaagtagcaacgaatcttcatggcagtaattctcagcatagcaagccatcatcccagtccaagataccatgcccttacaacaaatcccatcataaacttggcacgcagcgataaca

SEQ ID NO: 19608 - DNA, 434 bp, Glycine max
  unsure at all n locations
agcttgaagtgatctctattctgatgtgtgtggtccttttgaagtgaaatctctaggaggtaacagttactttatgtcattcattgatgaatttactagaaaaatgtggacctatctcattaagcagaaaagtgaagtgtttaacatttttaagaagtttaagctgtcgagtgaaaaacaaagtgtagatgcaattggctttgatgttttgatgatgatcatgatgatgtgttgcaattgatgcaaatgggcttttcaagattaaaattcaagacaatacttcaagattacaaggcacaacatcaagatgatcactagaatattangaagggaattcctaattgaattagcaaaggtttggccaagtgatttacaataaaaagtgtttttcacagcttttactctctggtaatcgattaccagacgatgtaatc

SEQ ID NO: 19609 - DNA, 440 bp, Glycine max
  unsure at all n locations
agtttcttattcaaggcacattcttggtggcgaagctccttcttccatggcttattccctagtggatggtgcctcttctcacctcttttcctttgtcttccgctgaatctccatggtgaaaaatcaccattgaatgaagctcaaagatccagcctccatagaagcttcacaagcaagcttccatcactttctctccctctccctccactcatcttctcctaccttcaagctcttacccatggcttcctatgttggtgagctntttcttgactcatcttttccttgaagtggcgtctccaatcatctttcttccatctccattctgctaccgttaaacttcaagaagcaagggactccattgatgaagatgatccaaggcctatatgctccacattgagttacattacgaaatatacttgtttgacaatgtagacaattac

SEQ ID NO: 19610 - DNA, 396 bp, Glycine max
  unsure at all n locations
agcttctggaaggagttctactagatgttctatgcctcttgaaggtggtagtccatgaggaatctccataggaaagacatttttaaattcctgcaataagggttgaacactaggagaaatagaaatagtaaactcattagaattatgagtagaaattttactgtctttgcaatactgtagattgagtggttcatgagcaggtaacattttcctcacttcactcgcctctgcaaaataattaacttttctctcatgtgtatcactctcttcctcgggtgtatcactctttctcatattcctttgtggcgcctcactattttctttctcttgatctctctcttctctcattctgatttgagcatcacacacttctctaggngatagatgtttaagagt

SEQ ID NO: 19611 - DNA, 426 bp, Glycine max
tcagaattcaatttcgagcgtctcaatagattacggttactcaatcagacattcgagcaaaacattattgtcgtttgaattagctcagagcttcagaattcaatttcgatcgtctcgatatattacgggtctcaatcagacatctgagtaaaaaagttattatcgttcgaatttgctgagagcttcaacattcaatttcgagcgtctcgatgttttatgggacttaatcagacatccgagtaaaaagttattgccgtttgaatttgctgagagcttcaacattcaatttcgagcatctcgatatattacgggactcaatcagacatccgagtaaaaagttatcgtcgtttgaatttggtcagagcttcaacattcaatttggagcgtatacatatattacgggactcaatcagacatccgagtaaa

SEQ ID NO: 19612 - DNA, 283 bp, Glycine max
tccgaacccggaacataagatagcgcgacgctcgatatagtacaacggacgtgctcaagaaattccaaaggtcataacttttcactgagaggtccaaatatgcaacataatacatcgagaccctcgaaattgaacaacggaagctctccagaaaaacgaatggtcataactctgcacttggatgttagaatttggaacataatatatcgagacactcgtaatagatcaacggacgctctcagaaattcaaatggtcataacttctcccacggatgtctgaatc

SEQ ID NO: 19613 - DNA, 432 bp, Glycine max
  unsure at all n locations
agcttgcttttgcagtaaagcatgaaagacatgcacaaagtgtgactatatgatgtggcaatagggtgtagtaagcaaatgctcacctccccctctaaaatttaattggattgggcttctaccaattcaattaaatttatttcccaacacacatatcaaatattcacttagtgcatgtgaaattacaaaactacccttaatacaaaaactagtctatgtgccctaaaatacaagagctgaaaaatcctatatttctagggtaccctacctacattatggagccctaaatacaaggaccaaatataatgacatcctagtctaatatgtataaagataattggactcaaccttggcctgtgggctcagacatctaccctgaggatcatgagaaccctanggtcttcttcaccagctatagcccaatcctcttgg

SEQ ID NO: 19614 - DNA, 423 bp, Glycine max
tatcataatcgattacatagttgtttttgtgacaattattgatttatttaggagtctctgttttaattgattaccatgtcatataatcgattacttttctttttataagtgtttcagaagtaaacaagaacactttaatcgatttctttgagtatctaatcgattacattgttcttgagttgtttctagttttttggaagaacactacaattgattgaaagataatataatcaattacttcattgaattaattaattaccttgtagatttaattgattacaggcggttataactgttttctctataaataaccacattgtgttctctctaataacataacattttgagcttctgaaagagctatgatcacgtgttgttattagttaaagaaagaagagaagaaaagtgcttagtcataacttc

SEQ ID NO: 19615 - DNA, 433 bp, Glycine max
  unsure at all n locations
agtttgtataaaattgaaacgacaaaaatttttatctaagatttccgaataaattccgtagtatatcgagacgctcgaaattcaaaataaacctctcagcaaaatgaaacgacaataactttttactcgaatgtccgaatgaatcccgtaatatatcgagacgctcgtaactgaaaacagaagctctgagcaaattcaaaagataataactttttactcgtacgtccgattgtttcctgtagtatatcgagaccctcgtaattgaaaccagaagcccgtagcaaactcaaacggcaataaatttttactcggatgcccgaatgaatcccataatatatcgaggcgatcgtaattganaacagaagctatgagcaaattcaaacgacaataactntntactcggatgtccgaatgaataccatntaaatcggat

SEQ ID NO: 19616 - DNA, 429 bp, Glycine max
tctggtatcaattacgagcgtctcgatatactactgttacataatcggacatccgagtaaaaagttattatcgtttgattaggctaagagcttgtgttttgaatttcgagcgtcttgatatattacaggactcaatcagaaatccgatttaaatggtattcattcggacatccgagtaaaaagttattgtcgtttgaatttgctcatagcttctgttttcaattacgatcgcctcgatatattatgggattcattcgggcatccgagtaaaaatttattgccgtttgagtttgctacgggcttctggtttcaattacgagggtctcgatatactacaggaaacaatcggacgtacgagtaacaagttattatcttttgaagttgctcagagcttctgttctcagttacgagcgtctcgatatattacgg

SEQ ID NO: 19617 - DNA, 438 bp, Glycine max
  unsure at all n locations
agtttgtcattgaattattngattncaggccagggataatttccattaacttggaccttaagaggggtgcaagtggcaggttcttgaagactgctgcttatggccactttggaagagatgacccagacttcacatgggaggtggtcaagcctctaaagtgggaataatgccatgaataaagctgattgccaagaaactatgtttgatcttatatgctttcatacctaagatccgtgatatgattttgccttagcttttgtatctttataaataaataaaacatatatatgtcgagttgagtatatgaacatacaaaggaagctgcatagcagcatcaatgtactattggaagttaatgtttgagatatatccgttacgatcgctatccattatccattatgtttcctctcaattgctgagagtcttagagaatcttga

SEQ ID NO: 19618 - DNA, 363 bp, Glycine max
gggagggcgacgcgagactcacgggtgcgtcttccaagaaaggaaaatgcatggagtcgccaccaacgtttatttggggaaaacatccgaaaaaccgaaaaagacgtggtctacaaactttaagtgtgaggctcgagagttgtatttacgcacggggaaggtattatcacctgttagacaagtggcctcagatatcttaagaagggggggttgaattaagatattccaaactgtttcccctaattaaaaatctattttattttttactcaagttataaattcccttaatgacaatcttcttaaatattaattcaaatgaagcaacttgaatatgattatatagcaataatatatataggagat

SEQ ID NO: 19619 - DNA, 436 bp, Glycine max
agtttgcttttgatcatgggtcagacgaataaggggctgaagatcaactcgtagtggctcacgacctaactcctatagtggtgaaagaaacctctgtctcacactatcacaggaaaacggttgacatttcaccacaagacgagaatttggaattgcacatagtatctttgcccagacctgcagtaccttgggtcgtaatctgaataaataaaacaacatgaatcacgggatacacgacttacctcttacaattaggtattcataatctaaaatacaagtacgtgatatatttaacaatattactacccttggcaagattgttggaactaccaattgcaacgaagccattggtaagagcatgagctggacaaactcgaccagcctcacgggattgagtgtaaccaaggaagcattccggttatcgaactatctcttc

SEQ ID NO: 19620 - DNA, 411 bp, Glycine max
  unsure at all n locations
tttcaagtttgctaacccatggaagctcctaatatctcccacactttttggggtgggccattcttggatggccttgattttctcaggatccacttggaccccatttctaccaactacaaaacctaagaaaactatattatctacacaaaaggtacacttctctatatttgcatagagggtgtttttcctaaggactgaaagaacttgtctgagatgtcctaagtgatcatctaggctcctactatacactaaaatatcatcaaaataaacaactacaaatctacctatgaaatcccttaagacatgattcataagcctcataaaggtgcttggtgcattagtgagcccannaggcatcactagccattcatacaaaccaaacttggtcttgaaagcagttntccactcatc

SEQ ID NO: 19621 - DNA, 433 bp, Glycine max
  unsure at all n locations
ntcatatcacttggatgcttcattgcttcaaataagtcgaatgatactttctgatcctccacacccaattctaacttgcctttccccatatctactatatagttggccatgaaatttgtagggtcctcctctatatccataaccacgaaatctgcaggaaatacaagctgcttgacttgaataaacacatcctcaatcactccatacggtctagtaatggagcgatcagccaactggagggttatacatgtgggcattatctctatctctccaagtcgccagcacatggatagaggcattaaattgatactagctcccaagtctatgagagctntacctacaacaacctcaccaatagaacacggtatagtgacacttccgggatcattatgcttcggnggaaggatgcgttgaatgactgtactacagttac

SEQ ID NO: 19622 - DNA, 434 bp, Glycine max
  unsure at all n locations
agcttatgtgaattcgtagttttataagcaaagagtaaaaatttatcataataaaaagctttcaaaaagaattttcagcctagccaacaggtattgttatttaattccaaattaagattgttttcaggtaagctaaaatccaagtggtctggaacattcagcatcaaagaagttatgctacatggagcaatgataattggaggatccagccaccaaaagaacatgcatcgtgaatggcagtagaatcaaaccctacttangtcgtgatttcaagaggttgaccactgttgtccaactacaagaggctngaaccacaacaaggatgtccagcttanacgatgttaaataagcgctcttgggaggcaatctagtatttttcaactcttcttttaatattnnntttctgattacgtaattgtgttgtgtaatatcta

SEQ ID NO: 19623 - DNA, 422 bp, Glycine max
ttaggaggaagcaggacatggacgtcagtttaccgtttagcttctgcacttcctaaacattggtaggattgtgaatcactagtatgtttgtgcatttgtcggggttggcttctattccctgatgtctaatcatgaaccccaagaactttccaccgcctaccccaaaagtgcatttttccaggttgaggcgcatgacgtacttatggatttctctgaacacctcttctaagtatgccacgtgttaggctatgctttgagacttgacaatcatgtcctcaacctagaccttgagattttttctgatatgttgtttgaagatccggtctatcagtctttagtatggggtgcctacatttttcaggccaaagggcatgaccctatagcagaagttagcatccacaggtatgaatgtcattttctct

SEQ ID NO: 19624 - DNA, 427 bp, Glycine max
  unsure at all n locations
ntaacataaagaacaaaagactggcctctgcacgaatattatacattgagcaaacaacactgatctcaaatcggtgataaaattctaattaatcgcaattggaagcttcataacatttaatttggataagattttatatgtaattattatttactttgtcaaataacaaacttaatgtaacaatcttatcattagatagtcattgagaagtgaatagaatgaaatgcatcttatttggttatttaatttcacctttttcaataactaaaatatgtataatgttttctaactcccgttctatctttaaaatgtatcctactcgaactagttccctgggcatttattatatgggtatttacaagtttaaataaattttaaaaataagaattatatgaaaatatcattattgttcaataataaatatcat

SEQ ID NO: 19625 - DNA, 433 bp, Glycine max
tctgcttatgctgcaaatatttacaatagacctactcaacctcagcagcacaatgaaccacagtagagcaattatgacctttccagcaacagagacaaccctggatggaggaatcaccctaacctcagatggtctagccctcatgaacaacaacaacagcctgctccttacttccaaaatgctgctggcccaagcagaccatacattcctccaccaatccaacaacagcaacaaccccagaaacagccaatagttgaggcccttccacaaccttccctcgaagaacttgtgaggcgaatgactatgcagaacatgcagcttcagcaagagaccatagcctccattcacagcttaaccaatcagatgggacaattggctacccaattgaatcaacgacagtcccagaattctgactagctgccttctcaagctg

SEQ ID NO: 19626 - DNA, 419 bp, Glycine max
tgtcttcaacaaacaaatcaaaatcaattttctgattttcaaaacctagctccagcttccttttccccatatcaactatgcagcttgcggtcaacatgaatttccttcccaatattatagggatgtcaatatcttcagagacatccattaccataaagtctaccgggaagataaaatattttactctgaccaaaacatcttcaattactccatatgacctggtaatggagcggtcaactaattgtaaagtcattcaagtggggcatttccaactctcccaatcttctgcacatggagagtggcatcaaattgatactggctcccaggtcaataagagcttttcctacattgacttctccaattgaacaaggaatcgttacactcccaggatctttatgcttgggtggaaggatcttcta

SEQ ID NO: 19627 - DNA, 429 bp, Glycine max
  unsure at all n locations
tttctttgtgggttgatgagttctgtcttgcagaatgtcgtgatcactggctgacatattctcaattagcttagttgcttcttccggggtcttcaactttattttttcccctgcagaagcatctagtagttgtgtggtttgtggtctcaacccatctatgaacatattcaattggattggctctgaaaacccatgggtgggagttcttctcaataaacctctgaacctctccaatgcttcactcaaagattcatcagggaactgatgaaatgaagatattgcagctttcccttccacagtcttggactctggcaagtatttctttaggaactnttcaacaacctcttcccaggtttttagactgttacccttagaggagtgaagccacctcttggcctctcctgccaatgagaatgagaataggccgag

SEQ ID NO: 19628 - DNA, 418 bp, Glycine max
ttctttgagttgcctaatcttctttttgttggcacttgctatgaggatgtcatccacatacaagagaagataaagaacacacattttcccctttttcaggatatatacacagttgtcatatttgtttctaatgaagccatatctgatcaagaactcatcaaatttcaggtaccacattcgaggactttgcttcagtccatacaaatattttttcagcaagcacaccttgttctccccttcttcaaaaccttctggctggttcatgtaaatggtttcctttagatttccatggagaaaagctgtttaacatccagctgttcaagttccaaatcatactgatttaccagaccaagtatgattctaaatgagcaatgcttcacaactggtgaaaaaatctcattgaatcaatccttcacct

SEQ ID NO: 19629 - DNA, 435 bp, Glycine max
agtcttcaacgttcattttcgagcgtctcgataagttacgggactcaatcagacatccgagaaaaaagttattgtcgtttgaattagctcagaagttcaacattcaatttcgagcgtctcgatatgttacgggactcaatcagacatccgagtaaaaagtcattgtcgtttgtattggctcagagcttcaacattcaatttcgagcgtctcgatatattacgagcctcaatcaaacatccgagtaaaaatttatggtcgtttgtattggctccgagcttcaacgttcattttcgagcgtctcgataagttacgggactcaatcagacatccgagaaaaaagttattgtcgtttgcattagctcagaagttcaacattcaatttcgagcgtctcgatatgttacgggactcaatcagacatccgagttaaaagtta

SEQ ID NO: 19630 - DNA, 430 bp, Glycine max
  unsure at all n locations
ttcagccaattcacccgacaataactttttactcggatgtctgattgagtcccgtaatataacgagacgctcgaaattgaatgttgaagctctgaactagttcaaacgacaataactttttactcggatgtctgattgagtcccgtaatatatggatacgctcgaaattgaatgttgaatctcaaagccaattcaaacgacaataactttttactcggatgtctgattgagtcccgtaatataacgagacgctcgaaattgaatattgaagctctgaactagttcaaacgacaataactttttactcggatgtctgattgagtcccgtaatatatcaagacgctcgaaattgaatgttgaccctctgagcatattcaaacgacaataactttnttctcggatgtttgattgagtcccgtaatatatcgag

SEQ ID NO: 19631 - DNA, 415 bp, Glycine max
taagggtccttagtggcataatcacacattatattttgtacctctaaaaatatcatatgatataagaatcaaacttatataatttcctaccaactaaacatgtgatgattaaagcctatgaataatattttaatttctttattagataataataataataataaatatccttgaatacatcgtctcgaagttgcatacatacgtagccacaaataaatgttacatatgtaaattatatcacagtaattctaaagaataaataatctttttaaaaggacaattttgatatattcatatatctttaagtagatataatttttaaaacataagatgattataggtattttgctagatatcatatagagataatgatatattaaagttgatgtaacatatccttgcctaagtgatcact

SEQ ID NO: 19632 - DNA, 351 bp, Glycine max
tttcaagcttgccttgccccttgatatattcgagggactcatggtcactatgaatgacaaattccttgggataaaggtagtgttgccatgttttcaaagcccgcactaaggcatacaactccttatcataagttgaatagttaagggtaggaccacttaacttttcactaaaataagcaattggatggccttcttgcatcaacacagccccaatcccaacatttgaagcatcacactcaatttcaaaagatttttgacaagttggcaacgcaagtatgggggcattagttagcttttgcttaagaacattgaaagcttcttcttgtttctctccccatgtgaaaccaacat

SEQ ID NO: 19633 - DNA, 431 bp, Glycine max
  unsure at all n locations
ntagctttgtccccaaggcttcatgtagacttgtcctttatcgttaagngaacctcggatccctatctaatacaatactagaaggaattccatgcaaccttactactcccttgatgtacaactccactagcttctacattctatacttcatattcaccggaataaaatgagcagatttggtgagtcgatctactatgacccacacaacatcatgtccacgactagtcttgggtaaactagatacaaaatccatagatatgctctcccatttccattccggaatttccaatggcttcaattctcctgatggtcgctggtgctcagccttagccttttgacatgtcaaacatcttgctacatattcagctacatctttcttcatgcccatgccaccaaaacttctcttcaaatcttggtacatcttagtcatt

SEQ ID NO: 19634 - DNA, 327 bp, Glycine max
gaatctgtacttcctaagagggagcgccacccactccacgtcattacaaactacctcatttcttcctctatagcccttagccgaatacaccttcgatagggtctctatttgacgcttaaccctctcatgcaacttgtttacaaactctgacctacattacccttctttatgtataaaataagtgtcgagtgggaggggaatgatgtctacaggcgactagggattgaacccatagacaacctcaacacgagatagcttgatggttctatgaacccccctatatgaggcgaagtgtacatgacgaagatactcatcccaagacttatg

SEQ ID NO: 19635 - DNA, 430 bp, Glycine max
  unsure at all n locations
gcttgagacattcattcataggggactgagaagagagggtttgttcttattcaaggtcggatgatgaagaggcagttcggctttgtaaagacagaaagaagttcatcagacaagctgttgaacatagaactcaatttgccacgggacacatagcatacatagaatctcttaaaagggtttcagctgcacttcgcaattacattgaaggcgatgagcctcgcgagttctcattagacacagtcatcaccccacctttcacgcctgtgaagaggaaaactggctcaggattcattcccatatcagcanaaccctttgctacaacaggagcaattgagtttgggatctgaccaaactctactttgaaagtgaattaccttaggcctggtggtaacccagcaatttcagttgaggaaaggcctcaatccccgga

SEQ ID NO: 19636 - DNA, 423 bp, Glycine max
  unsure at all n locations
tgtcacttatagtngatgcttatgtcatctcttcatttgatatgcaaacaggtggcttttacttatgaagatggacgccctgtagaaggtatgggtgtagggagaaagataatagatagggtgcaggagacatatcattctgacttaaatggtaaggactttgcatatgatggggagaaaagtctgtttactgttggctctcttcctcaaaacaagcttgagtttgaagttgttcttgaggatgtcacctctaacacgtagaagtaattagagagcatttagttgttgttttggctcttcaaattggttttcgtactattgtttcaatagcctatgatttattttttgtcttctatgaataatggcaattgcagccctgatggtctatgggacaatgagagtgactcaaagaggatgcgaccc

SEQ ID NO: 19637 - DNA, 352 bp, Glycine max
  unsure at all n locations
agcttcgttattcagctctagtgctggaccttgccgtgactttttgcttcctggaccaccatgatatcaagtttgagccaagaaagatagctgctcctgatgtggaacgtctttcatcaatatctgatgcccaatcaacatcatagaaagcatagagtgccatacgttgtgaaacagaagcagggcgaaggaataaaccatgacaaatagtacccttgagatatcttaatatccttttgaccacaacgcaatgagaatccaatgaattagccatatactgacaaaccttattaacatcatacctaatctcacgtctagtatgggtagcatactggagggcacncactactga

SEQ ID NO: 19638 - DNA, 423 bp, Glycine max
taacaccgatgactatcccaacatagctactgagtatggaatcagaagcatatcaactgttttgttcttcaaaaatggagaaaagaaagaaagcgtagttggtgcagttcccaagtccactttgtccgcaacagtggagaaatatgttgatgtataaactggaaaggaagaaaatgctataacaaggaacgcttgatcataaattatggaccatcttgcttttaatggttttcaacacttcaaaaagtactttgtatccacatcttttacaacatttgttaaagattacattgtataaattccctcttctcttctctgctgttccttctgccatacattacagttcacttcgccaaattctcatgccaagttaatttggcaccattactccaggtttgggagtaaactgaaatttcaatgtct

SEQ ID NO: 19639 - DNA, 426 bp, Glycine max
tgaaggtgtgtagcccaccatcttttcatagtagaattctggttatgtgtctactatcattgtcatcattttttttctccgtcattgaggtgccacttgagctgccaggtctctccacctttgggcgtatttttttgaaagatctgtgccccctttttgcacatgttttgtagttgcatcctatccgaagacattatactaacactgcctaacgaaggcaaccactaggtccttccaagaatggactcgggaaggttccaagttagtgtaccaggtaacagctaccctagtaagactttcttggaaggaatgtatcaacaattcctcatcttttgcgtatgcccccatcttccgataatacatctttagatggttcttggggcaagtagtccccttgtacttgtcaaagtccagcaccttgaactt

SEQ ID NO: 19640 - DNA, 439 bp, Glycine max
  unsure at all n locations
taagaataacatnntttttaatttggtttgattggaataatattttattatatatatatgtgcaatataaaaatagaaaaaaataaaaaagtataaactacgtacaaaaataaatgtaccacagaaatcatatactttaaaatgtttaatattcatttatattacatcaattttttttaaaaaactaacaactaaattgaccgaaaattacatcaattaacataattggagtgtgaatgtgtacaaaatgaattaattgtaattagataatataaattattcaaatataaaatgcttcatataaattcgtgtatcattatttttaggttttcatagttctaagtgtttttactatttaaaattattcatcattttcaccttatttttgtttactaattaatatgtttatattatatatttcactcatcatttttaattg

SEQ ID NO: 19641 - DNA, 416 bp, Glycine max
  unsure at all n locations
agtttatttattttataataagagaacaatgacaattgaagagttgattcatgtttactttgatgagtctaatgttttttctccaagaaaggatattttagatgatattgcagaatctttagaacaaatgcacattcatagacaagattctaaaggaaaaagagaaggaagcaatgaagatcctccagtagatgtcaaagcaaataatgatcttccaagagaatggaaagcttanggagatcatccccttgacaacattattggtgatacctcanaaggggtaacaactagacactctctcaaatatttatccaataacatggcttttgtatctacgatcgaacctaanaatctanatgaagccataatagatgcaaatgggataatagctatgcaagaagaaactataccaattg

SEQ ID NO: 19642 - DNA, 434 bp, Glycine max
agtttatttataaacaaaccctaaaccctaatttgtcaaatacccattaaacctcaatcagtcaagtaatcctaaacctttgtctttcaaatacccctaaaccataacaaccaaagtaaccctaaagtctaatttatcaaataaccataaaccctaattagttaagtacacataaaccctaattagtcaaatacacataaaccccaatttgtcaagtaaacctaattagttaaacacccataaaccccaatttttcatgtatcccatgaatcctaaattttcaaatacccctaaatagtgattaatcaagtaactctaaattgtctcataatcctaaaccctaattggtcaagtaacactaaagcttaaattttcacatacccataaaccctaattaagtcaaataaccctaaacctaattggtcaagtaacac

SEQ ID NO: 19643 - DNA, 420 bp, Glycine max
taaactaaattttagggcatgttaggcccatgctattgtgcaacacttgggcaacacttgagaatcccaatagcaagctattgtgttggactcttcccttcaaaaaagtaatttaatatcatgtgaatcattgacccacatatcagatattaatctgataagaacagatactacactcgatcttagccaaaaggccgagaaaggcatgagttgcaatgtcttgagaggctctctttataccgaaacatcaagtcattgttatcttttctaagcgatgtaggatttcaatcacagtttaacattggacattgatatatttcatgctcgttggtgcaaacaagggtgattttgatgaatgcattgaattaaaaagaaatcatgtcgagtggttgtgagacggcatgttcttgttctgtgttg

SEQ ID NO: 19644 - DNA, 408 bp, Glycine max
tcttagtttcagatgatgcacatgagtttgtagctacctcatgcactcctctaatgactatagcatcatttttggcgctaaactgttgggagttggaagccatcttctcaattaaattcctggcttcagcaggggtcatgtctccaagggctccaccactggcagcatctatcatacttctctccatgttattgagtccttcataaaaatattggagaagaagctgctcacaaatctggtggtgaaggcaactggtgcataattttttaaatctctcccaatattcatataggctttctccactgagttgcctaatgcctaaaatatcctttctgatggccgtggtcctagaagcacggaaaagtttttctaagaatactctcttgaggcatcccagctcgtgatgga

SEQ ID NO: 19645 - DNA, 430 bp, Glycine max
tgtaatcgattacacatatactgtaatcgattaccagagcagattttcagaaaatattctcaacagtcacatcttttatgtggttcttgaatggctatcaaaggcctatatatatgtgacttaagacacgaatttgctaagagtttttcagaacaaaaaggtcttatcctcttaaaaagcaaatcgttttatcctcttacaaattccttggccaaattacttgtgattcaataaggaattatttgagtactcaaattgttcaatctatctctttcaagagagatttcttcttctcttcttcttcattctgaaaagggattaagagaccgagggtctcttgttgtgaaagaattctaaacacaaaggaagggttgtccttgtgtgtttagaacttgtaaaaggaatttacaagatagtggaactctcaagc

SEQ ID NO: 19646 - DNA, 441 bp, Glycine max
  unsure at all n locations
agcttcaacatcagaccacttccagggtgctggaactacttcacatggacttgatggggcctatgcaagttgaaagccttggaggaaagaggtatgcctatgttgttgtggatgatttctccagatttacctgngtcaactttatcagagagaaatcagacacctttgaagtattcaaagagttgagtctaagacttcaaagagaaaaagactgtgtcatcaagagaattaggagtgaccatggcagagagtttgaaaacagcaagtttactgaattctgcacatctgaaggcatcactcatgagttctctgcagccattacaccacaacaaaatggcatagttganaggaaaaataggactttgcangaagctgctanggtcatgcttcatgccanagaacttccctataatctctgggctgaagccatgaacacagcat

SEQ ID NO: 19647 - DNA, 405 bp, Glycine max
tgtaggccttggatcttcttcatcaatggagtcctttgcttcttgaagatcaatggcagcagaatggagaaggaggaaagctgattggagacgccacttcaaggagaagatgagtcaagaacaagctcacaaccataggaagccatggataagagctttaaggtagaagatgagtggagggagaaggagagaaggaacacaaaattttatgtcccaaatgaggtcagaactttgaagtgtaattcccaaatgatcaaagttgaaaaactacacacataagacctctatttatagcttaagtgtcacacaaaattggagggaaatttgaattctattcaaatttcacttgaatttgaatttgaatttgtggagccaaatttggagccaaaatttcactaattatga

SEQ ID NO: 19648 - DNA, 395 bp, Glycine max
  unsure at all n locations
tattattgtttggagtttaaaacctgaaactcatgagaggtagtaagagaagaggaagcatgcgatgatcatgatgatgggccttaccgtgggccttggactcatcgtgggccccaccaacggagtacctcgcgtaacacttcccgagaaacatgtcaccgtaatccgctgtgccgcaatcgctcttcaggcgcgagatcgcctccgccacgcagtcctggcactccccgtagctcaagtcgccggtgcactgcgccacgccgtgtaccccaccggacccaccgacgcgaaagttcccaccggcggcggcgagtccggcgagcacggcgtcgcggctccccatggcgtcggngttgtacccgaccgacggcccgcacttcttcagcaccaccgtc

SEQ ID NO: 19649 - DNA, 416 bp, Glycine max
tcagcttgagggtagtgttgaaaatcagaattaatattctgattctattaataattgtaatttatagggacattatatttgatttagaggaaacaaaatatcctctatttatgtaccactaatgtaattatcctatataaacaagcatttgttgtgtactctgatacacggttttcactctagtatccctctttattttctctcattttacagatatgatttgatcacgataaatagggaaatttctcagctgataattaaggattatacacattattagtggttatgattccttatattgtactcttgattcattataaatcagaataacatgtgcaacacaactacataattacagtaaataacattgttatattgagtaatattctgagtgctgaccacaactacataagtgc

SEQ ID NO: 19650 - DNA, 362 bp, Glycine max
tgaatcggacctcagtgtgaaaagttatgaccatttgaatttctcgagagctttcgttgttcaatgtcgagcatctcgacatattatgcgctcgaatcagacatccgtgtgaaaagttatgaccatttgaatttctcgagagcttccgatgtttaatttcgagcctctcgacatattatgcgcccgaatcggacatccgtgtgaaaagttatgaacatttgaatttctcgagagcttccgatgttgaatttcgagcctctcgacatattatgcgcccgaatcggacatccgtgtgaaaagttatgaccatttgaatttctcgagagcttccgatgtttaatttcgagcgactcgatatatta

SEQ ID NO: 19651 - DNA, 438 bp, Glycine max
  unsure at all n locations
ntgngactattcacacaatttaacaagaaacaatgaaggatcaactgtgaaaattaattgcattcccatacctagatctccttctaaattccaccgaatttatatatgtttaaatgcatggaagcaaggattcaagactagctgtggatcttttattggtcttgatggttgttttttgaaaggctactatggtgatcatttgcttgcagcagcgggacaagatgcaaacaatgcattttttgtgattgcttatgcggtagtaaatgttgaagataaagataactggaagtggttcctcacattgttacatgaagaccttggagactgcaagcaatatggctgaaattttatgttagacatccaaaaagtgcaattcaattgttttgctttgatcaattcatatatagaatgttgtaattntgattgcctgcatgcata

SEQ ID NO: 19652 - DNA, 307 bp, Glycine max
  unsure at all n locations
tgcttgctaacccatggaagctcctaatatctcccacactctatggtgtgggccattcttggatggccttgattntctcaaggtccacttggaccccatttctaccaactacaaaacctaagaaaactatattatctacacaaaaggtacacttctctatatttgcatagagggtgtacttcctaaagactgaaagaacttgcctgagatgtcctaagtgatcatctaagctcctactgtacactagaatatcatcaaaataaacaactacaaatctacctatgaaatcccttaagacatgatgcat

SEQ ID NO: 19653 - DNA, 421 bp, Glycine max
  unsure at all n locations
agcttagctgtagcatttagtaaaaaaaaaaaaagttggggacagtgtgtttcttttatctgtcaactttctcccgttttctcaattaaaatgggtttaatgatgacccacgttatggaaacaaattattgttctcacataaattttgtatccattcgcttaatcaacaacatcatcgctaaagagcttanattggtgggcatcaagaaccaatttccttatagaagagaatgcgcccattattccaacacccgtgaagaccaccataattgaggtgttaatccaataagtgaaggatgattttggaggcttgtatgtcatgttgtacataagcataggcagaacgaaatccanagggatgaaaccaatggcaccaaccacaccgttgatgtctccaaaaaatggcagcatagctgccaca

SEQ ID NO: 19654 - DNA, 409 bp, Glycine max
  unsure at all n locations
tattctgagcatgattcctcctaatttccatgcccaaaatctttttagttgctcccatatctttcatctcaaattcactattaaaaagtgacttcagtttccgaatttcaaacttgtgtcaagatactatgggcatgtcgtccacatagagaagtagataaatgtatgcaccatccttcaccttactatgataaacacatgaatcatatggacttttattgtacccatgagagataattaactaatcgaatctcttgtaccattgtcttggagattgcttcaatccataaagagacctttacaacctacaaataaaatcttcctttccttgcacttcaaaaccttttggttgtttcataaaaatttcttcctcccactattccatggagaaaangttgtttcacatcaa

SEQ ID NO: 19655 - DNA, 439 bp, Glycine max
  unsure at all n locations
tgtcccaaggattcatatcctttaaccccaacatagataggcttgtggatggagtttttgaatgcagtttgataccataaggaatcataacctccaattaaacttagaaaaatgatttttcaaagtacatgccgagaagttcttaggttttatgttgacaaagaggggaattgagggtaacccaaataaatgcaaggccatcatgaaaatgagaattccaagaacggtcaaagaagtgaacaactcatagggaagatcatgtccctgtcttggttcttatcaaaatcgacagagaaggaactccctctgcttaagtgatttcggaagaacaagcacttccaatgggtgctagattgtgagaatgccttcaaacaattcaaggaattcctcacaacactacccattntaacaaggccgaaatcgaaaggctctatacttg

SEQ ID NO: 19656 - DNA, 397 bp, Glycine max
  unsure at all n locations
tgtaagagcttggtcacttcctttntcaccacatctagaatgacggngttgagtcgtcgctgtggctacctcactggcttagctgcatcctctaaaagtatcctatgcatgcaggtagatgggctaataccaggaatgtctgctaaagtccatccaatggccttcttgtgcttcttgagcaccggcaacaacttctcctcttgctcaacatcaagggaagcagagatgatcactggaaatttgatgcaatcctaccccgcaagggcattggatagaagactccaagtagattgggccagagatccaagggaaggccctagggttctcatgagccttaaggtagattntgagcccatgggctaagtatgagcccgcttatctttgtaattattagaat

SEQ ID NO: 19657 - DNA, 442 bp, Glycine max
  unsure at all n locations
agcttatagtcattacttgttaagaaccataagccagagtcgattgttcctttgataaagtgaagaatttgttttgcagccttgaaatgagtagtggttagagtctcgatgtattggctgatgagtactccagtagcatatataatgtttggtcttgtgtgtcaaatatcataaactacccaccaaactcttgaaatctatagcatccagttttcttgcttcgtcgaactttgataacttcattntgcactccatcagtgttccaattggcttgcatctatccatcttgaatntattaagcatcttctttgcgtagctttgcagtgaaatgaagatttcatcttctttctgctntacctcaatggcaagatagtatgacatttttccgatatcggtcatctcanacttcttcatcatttctttcttanactctgataattgt

SEQ ID NO: 19658 - DNA, 308 bp, Glycine max
ttgcagcctcgaaatgattagaggctagagtctctatgtataggctgatgagtactccagcaccatatataatgattggtcctgtcgtgtcaaatatcataaactacccaccatactcttgaaatctatagcatacagctttcttgcttcgtcgaactttgataacttcattttgcactccatcagtgatgcaattggcttgcatctatccatcttgaatttattaagcatcttctttgcgtagctttgcagggaaatgaagaattcatcttctttctgctttacctcaatggcaagatagtatgaca

SEQ ID NO: 19659 - DNA, 387 bp, Glycine max
  unsure at all n locations
agcttcttatccaaggctcatcttggtggtgaagctccttcttccctggcttattccctagtggatggcgcctcctctcacctcttttcctttgtctttcactgcatctccatggtggaaaatcaccattaaaggacctcattgaagctcanagatccaacctccatagaagccccacaatcaagcttccatcagttgtagacccctaagaccaagaaaagacagctttcacatgtccctttggtgtttttgcttattgccgaatgccattcgggttatgtaatgctcctgctacgttccaaagatgtatgatggctatctttgctgacatggtagagaagtgcattgaagtctttatggatgaattttcagtctttggcgcatctt

SEQ ID NO: 19660 - DNA, 393 bp, Glycine max
  unsure at all n locations
tgtagcaaatgcaaacggcaataacgttntactcggatgttcgattgagtcacgtaatacatcgaaacgctcgaaattgaaaacagaagctctgtgcaaattcaaacgacaatacattttaactcggatgtccgattgagtcccgtaatatatcaagacactcgaaattgagaataaaagctctgaacaaattcaaacgacaataactttttactcggatgtccgattgagtccagtaatatatctagacactcgaaattgagaatagaagagctgagcaaattcaaacgacaataactttttactcggatgtccgatggagtcccgagcgtctcgatatattatgcgcctaaattggacatccgagttaaaagttatgacaattttaattgc

SEQ ID NO: 19661 - DNA, 392 bp, Glycine max
  unsure at all n locations
agctntaactcggatgtccgattcangcgcataatatatcgagacacttgatattgaataacagaagctctcgagaaattcgaatggtcataacttttcacacggatgtccgattcgggcgcataatatgtcgagacgctcgaaattgaacaacggaagctctcgagaaattctaatggtcataacttttcactcggatgaccggatcaagcgcataatatatcgagacgctcgaaattgaacaacggaagcttccgagaaattcaaatggtcataaactttaactcagaggcccgattcatgcgcataatatatcgagacgcttcgaattgaacatcggaagctctctagaaattcaaatggtcataaactttcacttggaggtccgattc

SEQ ID NO: 19662 - DNA, 428 bp, Glycine max
  unsure at all n locations
agcttatgttgcaaacatttaaaatagacctcctcagcagcaaaaccaacaacaacagaataattatgacctttcaagcaacagatacaatccaggttggaggaatcatccaaatctgagatggacaagtcctccacaacaacaacaacctgtccctccttttccagaatgttgctggtccaagcaagccatatgttcctcctccaatgcagcaacaacagcagcagtcacaacaaagacaacaaggaactgaggctcctcctcaaccttccttagaagagttagtgaggcaaatgaccatccagaatatgcaatttcagcaagagacaagagcctccattcagagtctgacaaatcagatggngcagatggctactcagttgaaccaagctcagtcccaaaattctgacaaattgccttcacaaact

SEQ ID NO: 19663 - DNA, 358 bp, Glycine max
  unsure at all n locations
agctntcaatgtacaaacatttagtatatacaactcttatagagacagacacaatacagcagtcacaggcattgaactactccattgtgattgcatggatcatgagtatataagtatcatcacatattcacatatatctcatttatgattacttattatgcacatacctgtctgtccatccaagcaacactgtgacagatcacccaagcaggttgaatattctgggggaggactaggatactcgccagggcaatatgatccccaactactctcttctgcattggaagctgtggatgcatatatattgatatgttaggtaataagacctgctatgagtactccacatacacatgcctcc

SEQ ID NO: 19664 - DNA, 409 bp, Glycine max
  unsure at all n locations
tcaacattcaattntgagcgtctcgcaatattacgggactcaatcagacatccgagtaaaaagatattgtcgcttggattggctcatagaatcaacattcaatatcgagcgtctcaatatattacgggactcattcagacatccgagtaaaaagttattgtcgtttgaattagctcagagcttcaacaatcaatttcgagcgtctagatatatgacgagactcagtcagacatccgagtaaaaagttattgtcggctgaattggctcagagcttcaacattcaatttcgagcgtctcgatatatgacgggactcaatcatacatccgagatgaaagttattgtcgtttgaatttgctcagaggttcaacattcaatttcgagcgtctcgatatatgacaagactcaatc

SEQ ID NO: 19665 - DNA, 435 bp, Glycine max
  unsure at all n locations
agcttcttcataaacgtggcatttgtgtgcaatacataatgcctaaaacaccacaacaaaatggtgtatcagaaaggcgtaatagaactttaatggatatgattaggagtatgttaatcaattcaactttactcgtatttttgtggatgtatgccttgaaaactgccatgtatttgttgaatagggttcctagtaaggcagttccaaagacaccttttgaactgtggatgaataggacacctagtataaggcacatgcatgtttggggttgccagacagaaataaggatttataatccgcaagagagaaaatnggatgcaagaacaatcagtgaatatttcatttggtatccaaaaaagtcatggngtatatgtttttttgcctaatcatagtatgagaattggtgaaactggaaatgcanggttactgaaaatg

SEQ ID NO: 19666 - DNA, 246 bp, Glycine max
tctcgatatatgatgtcccggagtcggacatccgagcgagatgttatgaccattcacatatctcgagagctagcgatgttcaatggggagcgacaccatgtataatgtccgcgaatcgctcatgcgcgtgaacagtcatgaccattccaatttctcgagagctatcgttggtcaatgacaaccggctatataactaatgaccccaactccagcatccgagcgaatagttaggacccttcacctttc

SEQ ID NO: 19667 - DNA, 397 bp, Glycine max
tgaatcggacctcagtgtcaaaagttatgaccatttgaatttctcgagagcttccgtgggtcaatttcgagcatctcgacatattatgtgcccgaatctgactttcgtgtgataagctctgaccatttgaatttctcgagagcttccgatgctcaatttcgagcgtctcaatatattgtccgcctgaatcggagctcagtgtgaaaagctatgaccatttgtatttgtcgaatgcttccttggttcaatttcaagcatctccgaataattatagtcttgagtctaacctccgtgtgaaaagatgtgaccattcgaatctctcgagagcttgcgttgatcactttcgagcgtctctgtatattatgcgcccgaatcagacatccgggtgagaagtcat

SEQ ID NO: 19668 - DNA, 430 bp, Glycine max
ttcttagctacacacacgcctctcataactgagctcacctccttgagaagcttccttaagaagattcctaaagaagctagagtttaactacacatacctctctaatagctaagttcacctccttgagatgagaagctagaacttagctacacaccccctatagtagctaagctcacccccatgacaaactacatgagaatacgaaataaatccctactacgaagactactcagaatgcctcgaaatacaaggctgaaaccctatactactagagtggccacaatacattgcccagacgaaggagtaacctattctaatatttacaaagataagcgggctcatacttagcccatgggctcttaatctagcctaatgctcatgagaacactagggccgttccttgtatctctggcccaatctacttggagtc

SEQ ID NO: 19669 - DNA, 403 bp, Glycine max
tataggatactaaggtaatttgagcatccattctggtgctaccaagatgtatcatgatttaaagacgatgttttggtggcccaacataaagagagaggttattgagtttgtgtatgcatgcctagtctgtcagaaggctaagatagaacattagagaccttcaaggaagttacaacccttagagataccctagtggaagggggacagtatttccatggattttgtggtaggactacctaggacccctagaggcttagattctatctgggttattctcgatagattgactaagtctgctcacttcattcccattaatatcagattttccttggaaaagttgactaccttgtatataagtgagggtttcaagttacatggtgtgccatctagcatagtatctgat

SEQ ID NO: 19670 - DNA, 416 bp, Glycine max
  unsure at all n locations
gtgagccaatacaaacgacaataagttnttactgggatgtctgattgagtccagtcatatatcgagacgctcgaaattgaatgttgaaaccctaagctaattcaaacgacaataaatttttactcagatgtctgattgagtcccgtaacatatcgagacgctcgaaattgaatgttgaagctctgagctaattcaaacgaccatatctttttactcgggtatctgattaagtcccgtaacatatcgagatgctcgaaattgaatgttgaagctctcagccaattcaaacgataataactttttactcggatgtctgattgagtcccgtaatataacgagacgctcgaaattgaatgatgaacctctaagccaattcatacgacaatatctttntactcggatgtttgaatgagtcc

SEQ ID NO: 19671 - DNA, 414 bp, Glycine max
agcttcaacattcaatttcgagcgtctcgatatatgacgggactcaatcagacatccgagtaaaaagttattgtcgtttgaatttgctcagagcatcaacattcaatttcgagcgtctcgatatattacgggactcaatcagacatccgagtaaaaagttattgtcgtttgaatttgcttagagggtcaacattcaatttcgagcgtctcgatatattacgggactcaatcagacatccgagtaaaaagatattgtcgtttgaattggctgagagcttcaacattcaatttcgagcgtctcgatatatgacgggactcaatcagacatccgagtaaaaagttattgtcgtttgaattggctgagagcttcaacattcaatttcgagcgtctcgatatattacgggactcaatca

SEQ ID NO: 19672 - DNA, 401 bp, Glycine max
tgacagtgtttgatgcatcagggaacaatttcactttagtagtgggtcctaattggattcctaattttcaacttacctatttggatgtgacatcatggcagataggtcccaactttccgtcgtggattcagtcacaaaacaaacttcaatatgttggactgtctaacacggggattttagattttattcccacttggttctgggaagcacattctcaggttttgtatttaaacctctctcataatcatatccgtggtgagcttgtgactacaataaaaaatccaatatctatccaaactgttgatctaagcacaaatcatttatgtggtaaattaccctatctttcaaatgctgtgtataggttagacctttcaaccaattcattctctggatccatgcaa

SEQ ID NO: 19673 - DNA, 417 bp, Glycine max
  unsure at all n locations
tctagaattnttgtcagctgcatcaaaatgggaggcaacttgaggtttttgagtctttgcatcaactcatgctcaactttagcttggcttttatgttaacagttgcccaaaaatagagcaaatcgatttgaaatttgttcatgaccatatccataatgctccatcactagcagctgcattaataagaatgcactttcatgactgttttgtaagggtatgcgctccaatctttaagcttctttcatttttacttaacaagtacaatgttattgttagattaaggttaaggagctaactaagatgaagcatttcagggatgtgatgcatcagcccttttgaactcaacaaccaatcaggttgagaagaatgctcgtccaaatcttacagtaagaggctttgacttcattggcattataa

SEQ ID NO: 19674 - DNA, 433 bp, Glycine max
  unsure at all n locations
agcttaagctccttcaactgcacaaggctcttaatatttgaagagtatccttgtggaaccttcacccgacgaagacactgacaaaaacttatcttctccttcttggacaaagtatggcaggctgngggcaagtaaattttcttcccatcagaccttgaatgcaactgtgatcgtatacccatatcagctagatcttgacgggtattcaagtcatccttcgtcttgccttgaatgttaaggagcgtcccaatcacactgtcacaaacattnttctccacatgcataacatcaatacaatgtctaacatcaagatcacaccagtacggaagatcaaagaaaatggacctcttcttccatatgcaactctgacttttatccttcttttgggtcttcccanatacagtattcaggtgttgaacccgctgatatacct

SEQ ID NO: 19675 - DNA, 411 bp, Glycine max
  unsure at all n locations
agcttatgctgcagacatctataatagaacccctcagcagcanaaccaacaacaacagaataattatgatcttttaaggaacatatacaatctatgttggagaaatcatgcanatctgagatgggcaagtactccaaaacaacaacaacctgtccctcctttccagaatgctactggtccaagcaagccatatgttcctactgcaatgcaacaacagcagcagcagtcacaacaaagacaacaattaactgaggctcctcctcaaccttccttagaagagttagtgaggcaaatgaccatccagaatatgcaatttcagcaagagacaaaagactccattcagagtctaacaaatcagatggggcagatggttactcagttgaaccaagctcagtcccaaaattctgacaa

SEQ ID NO: 19676 - DNA, 430 bp, Glycine max
  unsure at all n locations
agcttctcatttgatccaacagaggaggagcatacaaactatttcactcaagtcactagcataagagacttggtcattactatcttgaaagaattctaaacatgaaaaaagggacatgtcaaaaggtctaccaatactttctgatagtttgccaaactatcatgcttgtcaatttggtaaacaaaacaaaaaatcattccccaaatcatcttggagagcctctcataagttgtagctaattcacactgatgtgataggacctcaaagaacaccatcactacaaggtagtctctactttattcatttcatagatgactntacaagaatgtgctggattntttttcttgaaattcaagcatgaagtggctgaagtatttgtgaagttcaagataatggtggaaactcacagtggctgcnagattcaatgact

SEQ ID NO: 19677 - DNA, 425 bp, Glycine max
  unsure at all n locations
agcttgtttcttgcaattccaagacactagagagcttcctaataggtggcatgtctaacttgtgctttttctatctaatttgcaacctgcaaaattagaatatgaaaagcctgttagatttaaggaagtatccttgggatacctcaaacctacattggttgtgtccttaaggtacttaatgatctttttgatagatgttaagtgagattccttatgattggtctggtaccttgcacataagtaaacactccactgatttaagtagaaaagtgatccaatcatacctctatatcttgactcatccactgattntcctttctcatctaagtcatggtaggttgaagttgccattggagtagatgcttctttgcattnttccataccgaatntcctaattagttntgtacaatacttggtttgactaa

SEQ ID NO: 19678 - DNA, 409 bp, Glycine max
tgaaggcaaactggatgcgttggtcaacttggtaacccaactggccttgaatcagaaatctgtacctgtcgcaagggtttgtggtttgtgctcctctgctgaccaccatacagacctttgcccttccatgcagcaacctggagcaattgagcagcctgaaacttatgctgcaaatatttacaatagacctcctcaacctcagcagcaaaatcaaccacaggagagcaattatgacctttccagcaacagatacaaccctggatggaggaatcaccctagccttagatggtccagccctcagcaacaacaacagcagcctgctccttccttccaaaatgctgctggcccaagcagaccatacattcctccaccaatccaacaacagcaacaaccccagaaacagccaaca

SEQ ID NO: 19679 - DNA, 430 bp, Glycine max
  unsure at all n locations
agcttagtatccactaacaagtacaaaccaaccgaaagaaaaattgaaaaagtaaagaagagagaaaaagtaaataaacatgtagaacaccattccaccaccaaataacacgtcaattaaagaaatgtgattggacagattatatatatatatatataggagagagatcaaattacattaactttaactttgattaagtattataccgttcaataatttttaattggataatattttcttaaaacctataatgggattgaaattttatttcacttagatcatatatacaaaattttatattaatccaaaattatttgttacctcattcattcagattaaaattgacctaatataaactnttcaaaatatattaaaatatagatcgtttgattaccttattattgttcaattntgacaaaaattcacacaa

SEQ ID NO: 19680 - DNA, 414 bp, Glycine max
agcttacaaatttgttttaagtcagttgaaggaccaaagtaaaaaagctttttctgttattgcttgaattcaaataggtacatatatatagagagtacaaaagagagagagggaggagagaggctatgacagtgacaatgcactgttgccttctgaaaaaaaaggctaccaactaagttaccaaacatggctaaattacaaggatattcaacactccccctcaagctggagcatataaatcatatgcaccaagcttggtacatatagtctgaatcttgggtcctcttaaggacttagtcaaaatatccgctggctgatcattagaaccaatgaactcagtgacaatctccttggacagaagcttctctcgaatgaaatgacaatcaatctctatatgcttggtcctctcatgga

SEQ ID NO: 19681 - DNA, 417 bp, Glycine max
agcttttgttatcggtcatcttccataactctaaggactgcagagcacaaggaagaaaaatatacattattgtcacagtaaacaagaatgggatgtttttagagaaacagaagtgttgaaatgaggatagtttgcagtattacaatgaaatgggtgcagttttttacatgggtctgatgcatgcagtccagaagtaaggtttttgaatccatgcattcattacaacagataatgaacaaaagcttaccgaacttcctccaatcaccaacaaagttgaataacttggatgataaacacaggaatgcaattggctcccagtggagctgaactcatgaatccattctcctcctgaggtcatactccaaaccttcaccagatttggactcacagatgccaaggcatcaccattcccatccc

SEQ ID NO: 19682 - DNA, 400 bp, Glycine max
tgtgtttttcgataggaggaaccagtttgagttggaggatctgcttcgagcttcggcggagatgctcggaaaaggaagcttggggactgtttacagagcggtgctcgatgacagctgcaccgtggctgtgaagagactcaaagacgctaacccctgcgagagaaatgagtttgaacagtacatggatgttgtagggaagctcaagcaccccaacattgttagactcagagcttattattacgctaaagaagacaagcttcttgtctatgattatctgcccaatggaagcttgcatgctcttcttcatggttagttaaactcaaactcgagcgagctctgatgggacatgatccttcatgataaactttaattaatttgataagcttgattgtttatatat

SEQ ID NO: 19683 - DNA, 418 bp, Glycine max
tcaacatcagaccacttccagggtgctggatctacttcacatggacttgatggggcctatgcaagttgaaagccttggaggaaagaggtatgcctatgttgttgtggatgatttctccagatttacctgcgtcaactttatcagagagaaatcagacacctttgaagtattcaaagagttgagtctaagacttcaaagagaaaaagactgtgtcatcaagagaattaggagtgaccatggcagacagtatgaatacagcaagcatactgtattatgcacatccgacggcctttctcatgacatctctgcagccatcacaccacaacacaatggcatagttgaaaggaaaaacaagacttttgcagaagctgctacggtcatgcttcatgccaaagaacttccctataatctctgggct

SEQ ID NO: 19684 - DNA, 420 bp, Glycine max
  unsure at all n locations
agctttctttttgatggcctcagctattctcttaggatttgtaactaacanatcatctacaagttgaatatcaactgaagcaagcaatgaagcccatgaaccccaatcatcttgatcaaacggatccttaattgacacaatgngaaattctttaacataattnttatatangtgaccaagactctgagtagagtgaacatgagctccatcattnggctgtttcatgaagttcanatcatacttcccatccttagtgtaaaactctgaagctgcaacatccataccaattntaatctgcaccattgttntttatttccagatcagcacaagtgaatattcanattatgcaacagaaataatcanaacttcacccaccttgccagtataaccagccttctcaatggcatccacgagtaaaac

SEQ ID NO: 19685 - DNA, 399 bp, Glycine max
gttcctttgatttgctctgatagggtttctaagcattagagagaaggagaagagattaaagtcttcattttgtactatctttgtgcgattcacttttctctctccatgaatattatttcacaaatcccaacggtggcggtgtgaagaattgaattgccaaccaggtgcctaaatttcacaatgatccaacggttaactagtttgtatcgtacttttattggacaggtttcgagtctctacgggaaaagagaaagctacaatgcgaaggacatttctcttatctccaacatttttttttcacaatttccaacggtgagaatgctcataaatgagttgcgaacctgatgctgaaatatctcgatgatccaacagttaacaagttcgagattgtcaatttac

SEQ ID NO: 19686 - DNA, 399 bp, Glycine max
  unsure at all n locations
agcttccattttctatgtcctttatctatagctcgtatccattagaaattatgtactttgatgtttggngacctgttccaataaattcaattgatgattttcgttattatttttgtggatcatttctccaagtatgtttggctctatccattgaaattaaaatctgatgtttcaataattttcccaatttttaaaaacttggtcgaaatacaattaaactcccaaatcaaaactctctactttgacaatggaggcgaatttattaaacttcaaccatttttacaaaatcatggcatctctcacatgacaaccccacctcatacccctgaacataatggtatttctaaacgtanacaccgtcacttagttgagactgttcgttgnctactacaccatgca

SEQ ID NO: 19687 - DNA, 404 bp, Glycine max
  unsure at all n locations
agcttttaactgaattagcaacgttccaaatgttttttaatggtgtaatcgataataatatattggtaatcgattaccagtgtatccgaacgttggaattcaaattcaattgtgaagagtcacatcttttcataaaatgcattgtgtaatcgattacatggttatggtaatcaattactagtgacaagttctgaataaaaagtcaagagatgtcactcttccaatggttttctcaagattttctcaaggttataactcttccaatggttttcttgaccagacatgaagagtctataaaagcaagaccttgactttgcattcaaataactttttacaacttttagaatctcttgaacaacttttgagaaatcttganacctttacaactcatctttcttcttctt

SEQ ID NO: 19688 - DNA, 445 bp, Glycine max
  unsure at all n locations
tatgctcgtcaaaaattcacatggaattacgataacttgatattcattatataattggcgtatatctatacgctacaactccgatcagataactctttaaagcacacttgttccctatagacatacattaaattgataagatattctttattgataggaataaaaaaatatattatttaaaatttataataactcacctatcaatttatcatatttgcatatgtacattaattatagaccgtaaaacaccaagtatatatggcctaagaaaatgcttcatgtcatatattaaataaatcttttcatacctgaaaaatagatcattcttaaattactacctacgaattcattntttgtcaaatacctacttgaaaaaaaaatttaatccttcggntaagtgatgacgtgacagaataccacatcattacgtccaatcactgacact

SEQ ID NO: 19689 - DNA, 189 bp, Glycine max
tgatattgcacaacggaagcactcgagacatgcgaatgtgtcattactattcactcggatgtgcgattcgcgggcataactcatctagatgctcggaattgtgcatcggaagctctcgagaaagtcgaacggtcataacttttcacacggatgtgcgaattctgggcataatatatagagacgctcgat

SEQ ID NO: 19690 - DNA, 425 bp, Glycine max
  unsure at all n locations
agctntggttatngattgaccccaggcctaaaccagcaaccactccatcttgcactgcagtcctgtaagctttggttaaggattgattgtattgagctatagcttgactctcgcctgtaaatgatgcaacctgcattggaggaatgtgtatcttttatattctactgtctacaaacatgtaaaagaacaagattgacaagttccattatgaagattggcatacttgtcgaattgaatcaattgtgcgctctactacagttgctgcttcagaataagctgcttgtccatgggatggcaactttgcaaaagtaaagctcatcatggaaccagagattaccagaggtggaatacaagatagaaggacaagggttagaagccaacccttgatgaatgctatgactaaacgtcctaaaaaacatgccaca

SEQ ID NO: 19691 - DNA, 377 bp, Glycine max
  unsure at all n locations
tgccgccacggagttntccgactatgctcttgtgtggtggatctagctacaaaaggagagagcaaganatgaagagccaatggttgatacatggacggagatgaaaaagatcatgaggaagcggtatgttccggctagttactcaagggacttgaaattcaagctccaaaaactaacccaaggcaacaagggggttgaggagtatttcaaggaaatggatgtgctcatgattcaagcaaatattgaagaagatgaggaggtaactatggctcgatttcttaatggtttgactaatgatatccgtgatatntgtgagctgcacgagtttgttgaaatggatgattngcttcacaaagcaatcccagtggagcaacaat

SEQ ID NO: 19692 - DNA, 386 bp, Glycine max
  unsure at all n locations
agcttgaaattgaacaacggaagctctcgagaaaatcgagtggtcataaattntcacacagatgtccgattcggggaaataatatatcgagacgcacgaaattgaacaacggaagctctcgagaaatttgaatggtcataacatttcactcggatgttcgatccggggacataatttatcgagacgctcgaaattgaacaaccgaagctctcgacaaattagaatggtcgtaacttttcacgcgaatgttcgattcggggacataactcatctagacgctcgaaattgaacaacggaagctctcgagaaattcgaatggtcataaagtttcacacggatggtcgatttcgggacataatatatcaagacaatcgaaattgaacaac

SEQ ID NO: 19693 - DNA, 375 bp, Glycine max
  unsure at all n locations
tgtcatcggcgcggttgacacatgtgatgatgcatgggaccttggcttgtaattgagatagcagaatatgatgagccaatggttgatacatggacggagatgaaaaagatcatgaggaagcggtatgttccggctagttactcaagggacttgaaattcaagctccaaaaactaacccgaggcaacaagggggttgaggagtatttcaaggaaatggatgtgctcatgattcaagcaaatattgaagatgatgatgatgtaactatggctcgatttcttaatggntcgactaatgatatccgagatattgatgagctgcatgagtttgttgaaatggatgatctgcttcacaaagcaatccaagtggagcaacaa

SEQ ID NO: 19694 - DNA, 398 bp, Glycine max
  unsure at all n locations
gttggtgcatagaagaagaagaagttcagagagattcaaagcttgtaaaggattgatcaaatgaatgtgaaaagtatattgaaaatcaaatcaaagccttacttttatagactcttcatgtctggccaagaagaccatttagaagagttataacttttagaataacttaaaaccaatttgaaaaagtcaaaaaccttttgaagagttacatattttttatttattcagagacaaacactggtaatcgattaccatattagtgtaatcgattacacagagcttttgtgtgaaaagatgtgactcttcatatttgaatttgaaattcaacgttcaaaggcactggtaatcgattaccaaaacattggaattgattacagctntgtgaaaataattggaac

SEQ ID NO: 19695 - DNA, 440 bp, Glycine max
  unsure at all n locations
tgtgatgacgacataagttcaagtcaggaatatatatatatatatatatatatatagcatgttgagagacaaatgtggngaaaagttaggctggttcttgaagaatccatgccatatggatgctacagagtgaaagggacttgttttagtgtagagagatgaagaaagttctacgttaatttggaatatgatttggtgtttggaaggagaaccgtaaaagagggtgcaagagttttccaacgtgttccagaggcttcatgtgttactttgtcaacatattggtcatattcatcggactacagcttttctctttaagtaatggtttgggcaatttcacactaagttgggattaagtccaatatcaataccatacctactagntacgttntcggctattgcttcctgcacctcttttatggtttctggaatggtcaatcccg

SEQ ID NO: 19696 - DNA, 384 bp, Glycine max
  unsure at all n locations
agctttcaatgtacaaacaattagtatatacaactcttatagagacagacacaatacagcagtcacaggcattgaactactccattgtgattgcatggatcatgagtatataagtatcatcacatattcacataaatctcatttatgattacttattatgcacatacctgtcttccatccaagcaacactgtacagatcacccaagcaggttgaatattctgggggaggactaggatactccccagggcaatatgttccccaactactttcttctgcattggaagctgtggttgcataaatattgatatcttcgggaagaagaccttcaaagatactcccagattcacatgcctncagataaaatacctgcattaccatcatgt

SEQ ID NO: 19697 - DNA, 361 bp, Glycine max
agcttttgatgcactagttcgaaggtatgtatcaacctggtcttgaaaatcaagatctcatgagccctttcaagaatggatgataaatgataattctgaattgggaaacataatattgcatatcatgactacgtgaatggcttcccatggccaccaagatcatacacttgcagcttttgtacaaaggagtttaagtctgctcatgcacttggtggacacatgaatgttcataggacggatagaccaaggttgaggcagtcatcaccctcaattcatgaagatcaaggacaagctgctggacctatatagcacaaccttaatcttgaccctaacaacaactcactctcatgatgatgggtgc

SEQ ID NO: 19698 - DNA, 427 bp, Glycine max
tcaaacctctcacaaaggagaagacaaagtaaagaatgtgaaatctaaactgatgaatgcaatacaacagtcgcaaatagaaatagttgttttctccaaaagctatactgaatctactttgtgtcttgaggagcttgaaaaaatcattgaatgcaataaattttaaggccaagtacttgtgcccatattttatgatgttgacccatcagatgtacgccatcagaagggtgcttttggaagagcattaaaagaacttgcacaaaacaaatattcaagagaccatgcggcataagtgtttgtgatgtggagccacacactcagcaaaactacagacttttggtgttgggatgcaagagagcaatgttgttagactcgtgattctacgtagaatcgtgaagacttcgtaaactcgacttcgagaatcgaa

SEQ ID NO: 19699 - DNA, 414 bp, Glycine max
  unsure at all n locations
agcttgaaggcaaactggatgcgttggtcaacttggtaacccagctggccttgaatcagaaatctgtacctgtcgcaagggtttgtggtttgtgctcctctgctgaccaccatacagacctttgcccttccatgcagcaacctggagcaattgagcaacctgaagcttatgctgcaaatatttacaatagacctcctcaacctcagcagcaaaatcaaccacagcagagcaattatgacctttccagcaacagatacaaccctggatggaggaatcaccctaacctcagatggtccagccctcagcaacaacaacagcagcctgcttcttccttccaaaatgctgctggcccaagcagaccatacattcctncaccaatccaacaacagcaacaacccaagaaacaaccaacag

SEQ ID NO: 19700 - DNA, 400 bp, Glycine max
  unsure at all n locations
ngaaggcaaactggacgttggtcaacttggtaacccagctggtcttgaatcagaaatctgtacctgtcgcaagggtttgtggtttgtgctcctctgctgaccaccatacagacctttgcccttccatgcagcaacctggagcaattgagcagcctgaagcttatgctgcaaatatttacaatagacctcctcaacctcagcagcaaaatcaaccacagtagagcaattatgacctttccagcaacagatacaaccctggatggaggaatcaccctaacctcagatggtccagccctcagcaacaacaacagcagcctgctccttcctttcaaaatgctgctggcccaagcagaccatacanttcctcaccaatccaacaacagcaacaaccccagaaaca

SEQ ID NO: 19701 - DNA, 381 bp, Glycine max
  unsure at all n locations
cctaagcagccaagtgaggcacaacagaacaattatgacctttgcagcaacaagtacaatcccatgtggaggaatcattccaaccttagatggatgaaaccttcacaacagcttctgcaataacaacaacatccatacttgcataatgttgctgggccaagcagaccatacgtttctgcaccaaatcaacaacagcagcaaccccagaaactacgaacagtcgaggctcctacacaaccttctcttagagaacttgtgaggcaaatgattatgcataacatggcagttcaacaagacaccagagcctncattcagagcttaactaatcagatgggacaattggctacacaattagatcaacaacagtgccagaattctgac

SEQ ID NO: 19702 - DNA, 410 bp, Glycine max
  unsure at all n locations
agctntntattttcagtagatgaagatgaatctgtggccacctcatggactcctctaaggacaatagcatcatttcttgcactgaattgttgggagttagaagccatcttctcgatcaaattcctggcctcagcaggggtcatatcactaagggctccaccactggcagcatcaatcatactcctctccatgttgctaagtccctcatagaaatattgaagaaaaagttgctcanaaatctggtggtgaggacagcttgcacacgatttcttgaatctttcccagtactcatacaagctctctccactaagttgtctgatgcctaaaatgtcttttctgatggcaatggccctagatacaggaaagaatttctccaagaacactctcttaaggtcatcccagctgaaaat

SEQ ID NO: 19703 - DNA, 420 bp, Glycine max
  unsure at all n locations
agcttctctacagtcttcatcaaatgctaacacaacatccttgtttagtaaattgctaagtggtttggcaatctttgaaatgtcttttatgaatcgcctataaaacccagcatgtcctagaaagcttctcactcctttgacatttactggaggagggagtttctcaatgacatcaatctttgctttgtctacctcaattcccctcacaaaaattgtatgccccaacacaatgccttcttgaaccataaaatgacatttctcccagttaagcaccaagttggactcttcacatctctgcaacaccctttccaaattcgatagatagcaatcaaaagaagagccanagatagagaaatcatccataagaatttcgatacacttctccaccatatcgaanaagatngccatcatgcacctctg

SEQ ID NO: 19704 - DNA, 393 bp, Glycine max
  unsure at all n locations
ntgaagttagtgtattttattattagtattattatacatataattaaatacttttatgggtatgattttctattgataattcatgtctatgattttgtagtgttattatgacatgatctcgaaagttattgatatgttgaaattagaaaatatttttatttaatttgatacatgtgtatatgattcatgagatatgataaattattatattgngatcatgaaattgtgattgagaatgtgtgtgtaagtgatgaattgtgagatatatgtgtattgagatgtgagctatgaactctacaatcacacaattgtaagagcctttaagagcgatgagttaatgcgcgataagnnttgtatgagctctactgtgggaacccgatgaagttaatcaat

SEQ ID NO: 19705 - DNA, 232 bp, Glycine max
tcaacattcaatgtcaagcgtctcgatatattatgggactcaatcagacatccgagtaaaaagttattgtcgtttgaattggctcggagcttcaacattcaatttcgagggtctcgatatattacgggactcaatccgacatccgagaaaaaaattattgtcgtttgaattggctcagaggctcaacattcaattttgagcgtctcgatatgttacgggactcaatcagaca

SEQ ID NO: 19706 - DNA, 431 bp, Glycine max
  unsure at all n locations
tatcctgtaactaccaagaaccatctggtaatcgattacagcctgttgtaatcgattacaaggtcctgttctatggtattttgcatttaaaactaactatttttcactcacaaaacctacacattgagtataacaatcattaacaacaatcaacaatcaaaatatacaattaaaacaagcatcaaaactctcaaacacattcatcaagcacaatcaaaattgcaaaagacaattatcaacaacaatcaacactcatcataactatcaaaacataatcattagagacaatcaaaactcaaacaaagacaatcattaatccataatcaacaataatcatcaaaagcaaactcaattatcaagaacaatagaacanattaacaatcatatgataagagataataatcaaccaagttaactatgtatctaagtca

SEQ ID NO: 19707 - DNA, 418 bp, Glycine max
  unsure at all n locations
tgcttcaggatttgaaagtgagacatttcctcaacatgttttcaaactcaaaaaagccctatatggacttaagcaagctcctagagcttggtatgaaaagctaagttcatttctcttgaaaatggctttgagcgaggaaaggttgacacaacactcattcacaaaaactatgattctcagtttttattagtgcaagtatatgtggatgatatctcatttttagtgctactaatgaaattctttgtgaagatttttctaagtagatgcagactgaattcgaaatgagcatgatgggagagctgaaattctttcttggattacaaataaaacaaacacccanaggcatctacattcatcagaccaagtatgtgaaagaattactgaanaattcaacatgggtgtcgcaatatagataaag

SEQ ID NO: 19708 - DNA, 392 bp, Glycine max
  unsure at all n locations
taacaatggggagatggaccattcaagtgctggaaagaatcattgacaatgcttacaaagttgagctgcccggtgagtataatgttagttccaccttcatgtcttgattacctcttttgatgcagatgtagaatccgatntgaggacaaatccttctcaagagggagagaatgatgaggacatgaccaagagcaagggcaaggatccacttgaaggacttggaggacctatgacaagggctagagcaaggaaagccaatgaagctcttcaacaagtgctgtccatactatttgaatacaagcccaagattcaaggagaaaagtccaagggtgtgagttgtatcatggcccaaatggatgaggactaaatgacaccactttgtctcnaatttt

SEQ ID NO: 19709 - DNA, 338 bp, Glycine max
  unsure at all n locations
agcttganattgaacaacggaagctctcgagaaaatcgagtggtcataaattttcacacagatgtccgattcggggaaataatatatcgagacgcacgaaattgaacaacggaagctctcgagaaatttgaatggtcataacatttcactcggatgttcgattcggggacataatctatcgagacgctcgaaattgaacaaccgaagctctcgacaaattagaatggtcgtaacttttcacgcgaatgttcgattcggggacataactcatctagacgctcgaaatngaacaacnggagctctcgagaaatttgaatggtcataagttttcacacgga

SEQ ID NO: 19710 - DNA, 428 bp, Glycine max
  unsure at all n locations
agcttgaatgataacttgatgccttggtcaacctaccaactcagcttgccatgaatcagaaatctacacctgttgcaagagtctgtggtatatgttcttctgcagatcaccatacagatctatgtccttctttgcagcaatctggagtcaatgagcaacctanagcttatgctgcaaacatttataatagacctcctcagcagcaaaaccaacaacagtagaataattatgacctttcaagcaatagatacaatccaggttggaggaatcatccaaatctgagatggacaagtcctccacaacaacaatagcctgtccctcattttcagaatgttgctggtccaagcaagccatatgttcctcctccaatacagcagcagtcacaacanagacaacaagcaatttcaaccttccttagaagagttagt

SEQ ID NO: 19711 - DNA, 422 bp, Glycine max
  unsure at all n locations
agcttggcactatcaacactataaggcanattcccaaaataaagcttggtggcagaggaatcagagtcttgttctgccaccgcttctccttcattctcctccactttctcttcttcaactaaaccagcaccatcatcatccacaacaacaacagcctcttcttgtgcaacagcagcagaaattctaggtccccacaacttgtgcgaattaatggacaaaggttccaccaagtgtgacccaaacatgccacggtttgagggcactgttgttatgagagggtctattatggagcagttcttggaggaacgaagacatttgacactgttaatagaagaagaaaacaaggaagctatgcctgcagcagcagtggcagccatgttgttgttgtgatgtaatgcaactcanaagtgtacattacaagt

SEQ ID NO: 19712 - DNA, 377 bp, Glycine max
cgtgatgacgacataagttcaagtcaggaatatatatatatattatatatatatagcatgtcgagagacaaatgtggggaaaagttatgctgtgtcttgaagaatccatgccatatggatgctacagagtgaaagggacttgttttagtgtagagagatgaagaaagctctacgttaatttggaatatgatttggtgtttggaaggagaaccgtaaaagagggtgcaagagtttttcaacgtgttccagaggcttcatgtgttactttgtcaacatattggtcatattcatcggactacagcttttctctttaagtaatgttttgggcaatttcacactaagttgggattaagtccaatatcaataccatacctact

SEQ ID NO: 19713 - DNA, 365 bp, Glycine max
  unsure at all n locations
ntggacgcgtttaaaggttttaatgctaaagtagagaaacaatgtggaaaataaattaagattgtgagattagatagagaggagagtattatggtaagtacacagagagtggacaagcacctggtccatttgcaaaatttctttaagaacatgggattgttgcccagtacactatgtctagttctccaaattagaataatgtggcagaaagaagaaattgaactttaatggacatggtaagaagtatgaggagtaacacaaaacttcctcagttcttgtggattgaaacacttaagatgattgtgtatatatttaatagagttccaaccaagggtgtctcaaagacaccttttgagttattcaaa

SEQ ID NO: 19714 - DNA, 335 bp, Glycine max
  unsure at all n locations
atcttggtgagtgggtcttgggcctgctgatcatgtgtgggctggctctgtattttgagcaatcaatgtaaaggtgcttagtttgctcatgaaacacgagattggccgctatgtggagaatgctttgattatcacaatatataacaactggatgggagcaattgatattaaatcattgagaagataggtgagccattgaaactcacacgtggttgaagtaagagctcagtatttagcttctaatgataaatgtgaaacaatatcctatttcattgatttctatganaccaaggatctgccaatgatgaagcaatttctgtgatggagttggacag

SEQ ID NO: 19715 - DNA, 426 bp, Glycine max
  unsure at all n locations
agcttgtaatgtttgttgccagcagcattgaaggattcaatgaattcaacattgttttcgaatatcaggaaacgtttttcatctcagcagaatccttgtatactttaccatatttttccatccactgctcatgtctttcgtagatggatgcatcatggagtttgcgggactttacttgggaagtgcaaattgagagaaggagaagtagagctaaaactttcaggtttttgccaatggaaatcatctctttgttagcaattaatgacactacgtactgattaattgttgctagagaaactctattgagtttagtgtttggagctagatgtgtaaattggtatgctcctaaggcaatgtttcgattagtatatataggattattgtccctttaaggggannatatttaatcttagtcagaatgaaact

SEQ ID NO: 19716 - DNA, 312 bp, Glycine max
  unsure at all n locations
tctatagaaggtttgttcctaatttctctacaattgcatcacctctcaatgagctggtgaagaagaatgtggcatttaactggggtgaaaaacaagagcaagcatttgatttgctcaaacaaaagcttactaaggcacctgttctagctcttcctgacttttctaanacttttgagctagaatgtgatgcctctggagtggtagttgtagctgtattgttacaaggtgggcaccctattgcttattatagtgaaaaacttcatattgccacccttcactaccccacctatgataaagagctctatgccttaa

SEQ ID NO: 19717 - DNA, 426 bp, Glycine max
  unsure at all n locations
tcacaaaagaaaagtggataatccacatattacaaaaggttgacttccacattaccatcccccacaaggaaacttgcaaacaagttnttctcaatagtttccctctcaccatctcacacaatccttctaataacaatagtaaacaagaaaagtgtcaatggatcaccttgtcttaaaattttttgagcgaaaaattcataagtatttcagcaacatcaaatggtacttgatgtcaaacatcccttaatccaatgaatccacttctcatcaaaacccaacctcttcatatagaacaagaaattccaattaatcanataataggttnttcataatctaaactaaagataagactntntctttttccttnttctttatcaatggtatcattcaccgccaacacactatgaagtangaattttctcccaa

SEQ ID NO: 19718 - DNA, 373 bp, Glycine max
  unsure at all n locations
agcttggagagcaagtcttccttagtattgttttcccttggtatgtggtacattttgagcaattgaaattatcaacaagggtttttatgacatgatagtttatgaggagaaccacttccttggctcgatatatgttttcaacccatccttggacaagtttcgagtccttatagcacctgagtttccttgctcgaacttcatttgccagttttagacctgctatgagtgctttatattttgtttcattgtttgatgccttgaagtcaaatttgagggcatgctccanagtgacattgttgggtccttcaagcataatgcccgcctcatttcctttcacattggatgcaccatcaacatacaagttccaccagtt

SEQ ID NO: 19719 - DNA, 421 bp, Glycine max
  unsure at all n locations
agcttgtccctgtgcctcctcctgagatattgnggtggtctttccaatgataacatcctcaccagatactcgtgtgccctatttcataataattaattagttcttgtgaaattccttgaggatagatcaaaaaggcataaattcagatatgcttactggtggggcaagaccatcatcatccagcttatcataagaaccatgtctcattccctgaaaaatgaaacttggtaagaaaccaccaacaagaaaccaatactcttttccaaataaaaattgttaagcaagaatagttatttgctaccaaacccaaatttctcaccatggtgttagctctatcaggacggccacaatcttctttgaccagggttcccatcttcttctcttcatctctataanaagttaagaatacagcatatcataa

SEQ ID NO: 19720 - DNA, 357 bp, Glycine max
agcttgtatttatttcttccttagtattgctttcccttggtatgtggtacattttgagcaattgagattatcaaccacggtttttatgacatgatactttatgaggagaaccacttccttggctcgatatatgttttcaacccatccttggacaagtttcgagtccttatagcacctgagtttacttgctcgaacttcatttgccagttttagacctgctatgagtgctttatattttgtttcattgtttgatgccttgaagtcaaatttgatggcatgctccaaagtgacattggtgggtccttcaagcataatgcccgcctcattttctttcacattggatgcaacatcaacata

SEQ ID NO: 19721 - DNA, 438 bp, Glycine max
  unsure at all n locations
tatgctacaaacatctacaacagacctccttaacctcagcagctaaatcagccacaacagaataattatgacctctccagcaacaggtacaatcccgagtggagaatcatcccaaccttagatggtcgaatccttcacaacaacagcagcaacaacaacaaccttattttcaaaatgctgctggcccaagcagaccatacgttcctccaccaatccagcaacaacaacagcaacagccccaaaaacagcaaacagttgaggctcctccgcaacctttcctagaagaacttgtgaggcaaatgactatgcaaaacatgcagtttcgacaagagaccagagcttccattcagagcttaactaatcagatgggacaatnggctacacagttaaatcaacaacagtcccagaattctgacagattaccttctcaatctatct

SEQ ID NO: 19722 - DNA, 418 bp, Glycine max
  unsure at all n locations
ttgcttgtgctattccaagttcattaatcatacctttaagccagattgcttccttcactccttcagctagggccatgtattctgcttcagttgttgaaagagcaacaactgattgttgatttgctttccaattgattgttataccaaacaaagtaaacacatatcctgttaaggacttccttgtgtctacatttcctgcaaaatctgcatctacatagcctgtgactactgcctcgtgtgctgtcttcttgtaccttaaaccagctttcaaagatccatttagataccttagtgtccacttcacagtttgccagtgtgcgcttgcaggatttcccatgaatctgcttataatacttacagcatgagctaagtcaggtctgatgcaaccattccatacattatgcttncaacaccactg

SEQ ID NO: 19723 - DNA, 389 bp, Glycine max
  unsure at all n locations
tatagaatatataataagataacaatgacaattgaagaatcgattcatgtttccattgatgagtctaatgctatttctccaagaaaggatattttagataatattgcagaatctttagaataaatgcacattcatggacaagattctaaaggaaaaggagaaggaagcaatgaagatcctccagtagaagtcaaagcaaataatgatcttccaagagagtggaaagcttcaagagatcatccncttgacaacattattggtgatatctcaaaaggggtaacaactagacactctctcanagatntatgcaataacatggcttttgtatctatgattgaacctaanaatttaaatgaagccataatagatgaaaatggataatagctatg

SEQ ID NO: 19724 - DNA, 313 bp, Glycine max
  unsure at all n locations
tgtaatcgattacacatatactgtaatcgattaccagagtatattnttagaaaatattctcaacagtcacatctttttatgtggttcttgaatgactatcaaaggcctatatatatgtgacttgagacacgaatttgcgaagagtttttcagaacaaaaaggtcttatcctcttataaagaaaaatcggtttatcctcttacaaattccttggccaaattacttatgattcaataaggaattatttgagtgctcanattgttcaatctatctttttcaagagagatttcttcttttcttcttcttcattctga

SEQ ID NO: 19725 - DNA, 302 bp, Glycine max
tacgtaagattgaaagaaacatacatatatatttgaaataatttatatttaaaattataagggatttttgcataactaattcaggtagaatttagatatataggaggggaaaatttataattataaagaagatacacataattaattcatgagaatttaaatttaacatttttaaagaagttaataatgatgagtgtagactaacgttattcataagatacttctatactctaatttcattcatacgactggagcagatgattcaaaacatgagaacttaggtgcaacatctataataatat

SEQ ID NO: 19726 - DNA, 359 bp, Glycine max
agctttgatgttgttagtcgtcatttggatgtcgagagtgtcatcttgttggattctgagaagaagatcaataaaatcttggtcctctaattcagctccatcttcttttgcaattttgttcttttcttgatgctctctgatgatggtttccaggaccttgtcaacctgcttgtgcaacttcttcaatctggtcatctttccagttaggaaatataagaatggaattgaaggatagacatcatcaaggtcgaatcctcccccggattctacgatttttcggatcaaagacaccacaaactcatcttgctccttgcatatgccaccgactgctatcctgtaaatagaggctcatatcaatg

SEQ ID NO: 19727 - DNA, 348 bp, Glycine max
  unsure at all n locations
agctttgagcatattcaaacgagaaataaatttgactcggatgtccgattgagccctgtaatatatcgagacgctcgtaattgaaaactgaagctttgagcacattcaaacgagaataaattntgactcggatgtccgattgagccgtaatatatcgaaacgctcgtaatagagaacgaaagcacgtagcaaattcaaaccacaataaattttaactcggatgttcgattgagttctataatatatcgagacacttgatattgaaaacagaagctctgagcagattcaaacgacaataactctntactacgatgttcgaatgagacccgtatatatctagaatctcgt

SEQ ID NO: 19728 - DNA, 452 bp, Glycine max
  unsure at all n locations
tcatgagagagtcaaagatcaaattgagaggaanaataaaagctatgctaaacaagccaacaaagggagaaagaaggttgtcttcgaacccggagattgggtttgggtgcacatgagaaaagaaaggtttccgaaacaaaggaaatcaaagcttcaaccaaggggagatggaccatttcaagtgcttgaaagaatcaatgacaatgcttacaaagttgagctgcccggtgagtataatgttagttccaccttcaatgtctctgatttatctctttttgatgcagatggagaattcgatttgaggacaaatccttctcatgagggagagaatgatgaggacatgaccaagagcaagggcaaggatccacttgaaggacttggaggacctatgacaagggctagagcaaggaaagccaaggaagctcttcaacaagtgctgtccatactatttg

SEQ ID NO: 19729 - DNA, 450 bp, Glycine max
  unsure at all n locations
agctntgcttctacttaggtcttaagtataacttactaagcataagtcaattgtgcgacggtggttatattgtatccttcaacaaagagtaatgtatagtcaagacaaaagatgacaagtcctttgttactaccaaatgacacaacaatctgcatgagattgatctaataggtctaagtaaacagaatgtgacatgtctgctttctagagaagatgagagatggatttggcatagaaaacatagtaatgtcaatttgaaacgtatttcataactttctaaaaaagatttagtgaaaggactacctaagatttgttggaaaacccatcttctctgtgaaggatgtcaacaagggaaatagatcanaacttattntanatctaaagatggtgtttccaccattaaaccattacacatattgcacatagatatgtttggaccaacttgaaccg

SEQ ID NO: 19730 - DNA, 454 bp, Glycine max
  unsure at all n locations
tcgcccctagttgcgcattgtgtgtaaatacatgatcctgtgtatgatgatcacggatacaaggcaaccagggaatgatattgatgtgtatcttacaccattaatcgaagacttgaaaaaattgtgggaagaatgagtagatgcgtgggatgcaaatgtgcagcatacattcacattacacgcaatggtgttttgtactattaatgattatccagcatatggaaatttaagtggatatagtgtgaaaaggcatcatgcatgtcctatctgtgagaaaaacacaagcttcatccaactcaagcatggaaagaagacagtatatacgagacaccaaagatttctgatagcttttcacccttattgatgattgaaaaaatcttntaatggaagtcaggagaatgaaggctccccagaaccattaactggaaaccaagttcatgatcgggtaaaggac

SEQ ID NO: 19731 - DNA, 437 bp, Glycine max
  unsure at all n locations
agcttaatacccataatcacatctacaggaccaaggtccttcatatcaaaaattttagacaagaaagacttcacatcatttatgaattgcatattactaccaaatatcaatatgtcatccacatacaaacataaaatgacacatccattatcatcaaattgtttcacatacacacatttatcagtattattgattagaaaaccatacgaaagaacaatttgatcaaatttttcgtgccattgctttggagcttatttcaaaccatataaagatttaacaagtttgcaaactttcttttctttccccggttctacaaagcctttaagttggctcatataaatttcttcttctaattcaccatttaaaaagggcagttttacatccatttgatgaaatttctaaataanaacacaagcaagtgcaattaagaccctaat

SEQ ID NO: 19732 - DNA, 368 bp, Glycine max
  unsure at all n locations
taatctacatgtccaagcctcctctcccattgaacccaacactatcacccaggcccttcgcgaccctgattggcgctcagccatgcaagccgaatctgatgccttacaccacaacatcacttgagatcttgtcagtcggtcctctgatcaaaatttggttggctgtanatgggtatttcgaatctaacgaaatccagacggatcaattgatcgttacaaggctctgttagtcgccaaagggtttcaccaacgctctggttgggactatacagaaacttttagccccgttgttaaaccggtgaccattcgcattgtcctaactctcgcagttcgtcaagggtggcccatacgtcagcttgatgtcaaca

SEQ ID NO: 19733 - DNA, 456 bp, Glycine max
  unsure at all n locations
taaagtctcacgattgccatatcttgatgcaataattgttattcgtggccatacgagacatttttcctaacaaagtcaaacatgccataactcaatcgtgctttttcttcaatgtcatatgtagcaaagtccttgatcctgccaagttagatgagctagaaaatgaggctaccaatacattgtgtcagatggagatgtattttcctcctgtgttcttcggcattgtggttcacttaattgttcatctggtgagggaaattaaatgttatggtcttgtttatttgtggtggatgtacccgattgaacaatactagaagatcttaanatggtatacaaagaatctacaccgttttgaagcatctattgtgggaaggtacattgtagaagaagctattgagttttgttcagagtacattgaaaaggcaaaacttgttgtgcttcccaagtctcgacatg

SEQ ID NO: 19734 - DNA, 442 bp, Glycine max
  unsure at all n locations
agcttgtaggcctaggatcttctttatcaatggactcctttacttcttggaagatgaatgacagtggaatggagaaggaagagagagagaggagatgccacttcaaggagaagatgagtctagaaggagctcaccaccataggaggccatggataagagcttggaggaagaagaagataaatgaagggagaggaagagaagaacacgaaattttatgctttacaagagctctaaaatctgaagtttaattttcaaatgatcaaagttcaaaaaaatacacacacatgacctctatttatatcctaagtgtcacacaaaattggaggaaaatttgaatttctattcacatctcacttacatttganattaaatttgtggagccaaaatttcactaattatgattagtggaatttagctatggttcagtccactagtccaagat

SEQ ID NO: 19735 - DNA, 330 bp, Glycine max
  unsure at all n locations
tagcttgaatctgacatccgtgtgaaaagttatgaccatntgaatttctcaagagcttccgttgttcaatntcgagcctctcgacatattatgcacccgaatcggacatccgtgtgaaaagttatgatcatttgaatttctcgagagtctccgatgtttaatttcgagcgtatcaatattttataaccgcgaatcggacctcactgtgacaagctatgaccatttgaattcgacgagagcttccgttgttcaatttcgaatatcactatatgtgatgcgcctaaattggacattcgagataaaagctatgaccattaggatgtctcaaga

SEQ ID NO: 19736 - DNA, 382 bp, Glycine max
agcttggatgaagaatgagatgaatgaagggagagggagagaagagcacgaaattgtgtgctctaaaagagctctgaaatctaaagttaatattcaaatgatcaaagttcaaaaaaatgcacacacatgacctctatttatagcctaagtgtcacacaaaattggagggaaatttgaattttaattcaaatttcacttgaatttgaaattgaatttggggagccaaactttggagccaaaatttcactaattatgattagtgaattttagttatagttcagcccagtaatccaagatcaattccaagattctccactaagtgtgcttaagtgtcatgaggcatgtaaagcatgaaagacatgcacaaaatgtgactatatga

SEQ ID NO: 19737 - DNA, 371 bp, Glycine max
  unsure at all n locations
agcttgtacatctctgtttctctacctttcatcacanaccctggtggttgagtgacaaaaacttcttcttctagtgagccattaagaaatgcagattttacatccatttggtgtacttcccagcaattgaagctagccattgctattacaagtttcactgtttccaacctagcaacaggggcaaatacttcatcataaaccagaccttgcttttgcaaaaatccctttgcaaccagtctggctttgaactttgttacttctcctctacgattcaacttagttgtgtagacccattctactgctatggctttctttcctattagtagctatgtgagactccatgtcttggttctctcaatagacctcaactc

SEQ ID NO: 19738 - DNA, 436 bp, Glycine max
  unsure at all n locations
nttgtgaatgtatgtatacatgantttgatgatgccaaagataatcgtcttctcaagtttgatccaagtcaagaattcagaaattcataaaataactccccagagtcacaactcttcagaaaataactcctgagagtcacatctgttcaagagatttttgaatggacatcaaaggcctataaataggtgacttgngacacaaaatgaatgagagagattccaagagaacttcattctcaaatgctctctcaaaagaaactcttgggcaaacacttgcaaatccattaagagttcatccatggacttcaattgtaatatccttctcttcaagagagaattcatcttctttcttcttatacaaagagattgattaagggaccgagggtctcttaagttgtaaggattcctgaacacaagggatgggtngtccctgtgt

SEQ ID NO: 19739 - DNA, 434 bp, Glycine max
  unsure at all n locations
agctntgagtctattcaatctacaataccttttgactcggatgtcggattgagtcacgtaatatctcgagacactcggaattgaataccgaagttatgagcaaattcaatcgacaataaatttttactcggatgtcggattgagtcacgtaatatatcgagacgctcgaaattgaataccgaagctctgagcaaattcaaacgacaataactttttactcggatgtccgattgagtcccgtaatatatcgagacgctcgatattgaataccgaagctctgagcaaatcgaaacgacaataaatttttacacggatgtcggattgagtcacgtaatatgtcgagacgctcgagatagaatacctgaactctgagcaaattcagacgacaatacctattgactcggatgtcggattgagtcacgtaatatcttcga

SEQ ID NO: 19740 - DNA, 421 bp, Glycine max
  unsure at all n locations
agcttgtcatatggaaggataggataccctatgctttntggaagggcaacccaacagtgtctattattaggagagaactcggcaagtgcaacaccacagaaaaacatgattggaatgcaagaatatatgacatagtaaatatataatctaaaaatttacttttgttttaggttaatgcattaattatctcaagattaaattaacacattttttctctctctcttttcagcaatggttgcgagagagagcaagtaattttgagaactcaaaacttgaaaatcaatgtacctttaggtaaagttntgaagcatattttatgattctgatttttttaaataattattatagaaggggttagtttactcttttgaatctgtcacatataatcttttttagattgtacttactacattttgaaact

SEQ ID NO: 19741 - DNA, 430 bp, Glycine max
  unsure at all n locations
agcttatagattatataataagagaacaatgacaattaaagaatcgattcatgtttcctttgatgagtctaatgttatttctccaagaaaggatattttagatgatatttcagaatctttagaacaaatgcatattcatggagaagattataaaggaaaaggagaatgaagcaatgaagatactccagtagaagtcaaagcaaataatgatcttccaagagagtggaaagcttcaagagatcattcccttgacaacattattggtgatatctcaaaaggggtaacaactagacactctctcanagatttatgtaataacatggcttttgtatctatgattgaacctanaaatttanatgaagccataatagatgaaaattggataatagctatgcaggaagactanaccaatttgaaagaaataatgttt

SEQ ID NO: 19742 - DNA, 380 bp, Glycine max
  unsure at all n locations
tatagtctcacgaatgccatatcttgatgcaataattgttattctttgccataccagacattattgctaacagagtcggacatgccataactcaatcgtgctntttcttcaatgtcatatgtagcaaagtccttgatcctgccaagttagatgagctacaaaatgaggctaccaatacattgtgtcagatggagatgtattttcctcctgtgttcttccgcattgtggttcacttaattgttcatctggtgagggaaattaaatgttatggtctctgttatttgtggtggatgtacccgattgaacaatactagaagatcttaaaatggtatacaaagaatctacaccgttttgaagcatctattgtgggaaggtacatt

SEQ ID NO: 19743 - DNA, 162 bp, Glycine max
  unsure at all n locations
ntaactcggatgnncgattcaggcgcataatatatcgatacatttgatattgaataacagaagctctcgagagattcgaatggtcttaactgttcacaccgatgtccgattcgggcgcagagtatagaagagacgctcgaaattgatcaacggaagctctcg

SEQ ID NO: 19744 - DNA, 280 bp, Glycine max
  unsure at all n locations
taagacatctctctatggacttaaacatgcaccgatgcaatggtatggtttacttanaaacttccttcttgaacaaaaatttgagagaggaaaagttgataaaacacatttcattaaaaagatctctcataacattttactcatgtaagtttatatggatgacatcatttttggttctactaatcgatctctttgtgaagattttgtacacaagatgcacgaggagtttgaaatgccaataatggggggggggattatattactttcttggtctctatgt

SEQ ID NO: 19745 - DNA, 446 bp, Glycine max
agcttgaaggcaaactggatgcattggttaacttggtaacccagctggccttgaatcagaaatctgtacctgtcgcaagggtttgtggtttgtgctcctctgctgaccaccatacagacctttgcccttccatgcagaaacctggagcaattgagcagcctgaagcttatgctgcaaatatttacaatagacctcctcaacctcagtagcaaaatcaaccacagcagagcaattatgacctctccagcaacagatacaaccctggatggaggaatcacgctaatctcagatggtccagccctcagcaacaacaacagcagcctgcttcttccttccaaaatgctactggcccaagcagaccatacattcctccactaatccaacaacagcaacaaccccagaaacagccaacagttgaggcccctccacaactttccctcgaagaa

SEQ ID NO: 19746 - DNA, 338 bp, Glycine max
  unsure at all n locations
tgtagcanattcaaacaggaaataaattttactcggatgtctcattatgtcccgtaatatatcgagatgcttgaaattgaaaacggaagctcgtagcaaatgcaaaacacaataactttttactcggatgttcgattgtgtctcgtagtatatcgagacgctcgttattcaaaacagaacctcgtatcaaattcaaacgacaataactatttactcgaatgtttgattgtgtcccatagtatatcgacacgcttgcaattgaaaacagaagctcttagaaaattttaacgacaataactttttactctgatgtccgattgggacccgaatatatcgag

SEQ ID NO: 19747 - DNA, 367 bp, Glycine max
tgatgactaccctcttatgtgaacaatacgggtatttacgatcttgttacatgaatatggcacagccattagaaataacgctaggttagtagccaatggatacaatcatgaagaggggatagattatgaggaaacatatgctcctgttgctagattataagccataacagagatattagccgttgcatccataatggaatctaaactttatcaaacggatggaaagagggcctttgtgagacgcttatcccagaggacgtatatgtctatcaaccccctggctttgaaaactcagatatgcctaatcatgtctttatattgaaaagggctttatatggtatacaacaagcctctagggcttggtatg

SEQ ID NO: 19748 - DNA, 383 bp, Glycine max
  unsure at all n locations
tcttagtttcacatgatgcagatgggttngtagctacctcatgcactcctctaatgactatggcatcatttctggcgctaaactgctgcgagttggaagccatcttctcaattaaattcctggcttcagtaggagtcatgtttccaagggctccaccactggcagcatctatcatacttctctccatattactgagtccttcataaaaatattggagaagaagctgttctgaaatctgatggtgggggcaactggcacatagtttcttaaatctctcccagtactcatacaggctctctccactgagttgtctaatacctgagatatccttcctgatggttgtggtcctggaaacaaggataaatctttctaagaatactctc

SEQ ID NO: 19749 - DNA, 415 bp, Glycine max
  unsure at all n locations
agcttgcacattgctgcttgatagaagaagagcaagacggtaaatcatggtactttgacatcaagcggtacgtagagtataaggagtatccacagggggcttctgacaatgacaagaggacattgtgaaggttggcaactagtttctttttaagcggaggtatcctatacaaatgaaatcatgatatggttttgctctgatgtgtagacactaaagaagccgagcgaatgctcatggaggtacatgaagggtcctttgngatgcatgctaatgtgcatgtcatggctaggatgattctaagggcagactatcactggctcaccatggaaaatgactgttgcatccatgtgaggaaatgccacaagtgccaggcattcgcgaacaatgtgaatgctccgcctatgcctttgaacat

SEQ ID NO: 19750 - DNA, 440 bp, Glycine max
agcttctcctataacacagtatcatcagcatattgaagaacattcacaggaactttgttcttccccaccaaaaaacttctgaacctattctgggaaactgcttctctcatcaaccctgtcaatccctcagccactaaatcaaagaggagaggtgccaaggggtcaccttgtctcaatcctctttgaggattaaattctgaagttgggctgccattaacaagaacagaaatggaagccgaattaaggcaggcccttatccatctaatccatctctcatggaaccccattctcttcagcatataaatgagaaattgccaagatacagaatcatatgccttctcacagtccaccttaaaaaccatacaagacttctcggatcttctagcctgctcaatcacttcattagccaccagaactccatgaagcaattgtctaccctg

SEQ ID NO: 19751 - DNA, 417 bp, Glycine max
  unsure at all n locations
agcttgataatggaagacacatgaacagctctaggcaataacattcatggggctccgaanaatggtgagaatggaggattgccttgagggtcctcacttangcaatcatgaaacacaactccaaactcgaaagtggaggacacatgaccagccctaagcaataacattcatgtggctccgaaaaagggtgagaatggaggattgccttgagggtcctcacttangcaatcatggaacacagctccaaactcgaaaatggaggacacgtgaacaaccctaagcaatagcattcatgtggctccgaanaagggtgagaatggaggattgccttgagggtcctcacttangcaatcatganacacaactccaaactcgaaaatggaggacacatgaacagccctaagcaataacattcat

SEQ ID NO: 19752 - DNA, 339 bp, Glycine max
  unsure at all n locations
gtttacaaagcgtcgatgccaagtgtatactgtttttatttcatgntacaattgtacgcagcttgtgtctccttcatagagagggcatgcacgatggcctttaacactgcattcattcaaattcctatatgctagaaagtcattaatggtgcccaataacattgcacacaacttgaatgatcaatttggatagccatcaaacacaacaatgcactcatactacaactttgtcaagtacttaatcaagggaccgagataaacaccaatatcatatcctcggctgtcttgcggctgatagcatcattgacaacatcatgtatatttgttgcatgcgcaacc

SEQ ID NO: 19753 - DNA, 352 bp, Glycine max
agcttgctcgagcatgtatcaacttataccaatgtgtatgagttacggacaaagcttgaatctttgattcaaaagaagacgccaaggaataaagctcatcttgtgagacgcttggtcaaggtggagtacatgggtggttagaacatgattgaacatcttaaaaccttcaaatgtattgttaatcaattaaagaagatagatatgaatatagattatgaactacaaactcttctactcctcaattctctgcctgagagttaggacacattggttgtcactctcaacaactctaaactagatggaaagcttagcatggataatgtcacagatagtttgctaaatgaagagtcta

SEQ ID NO: 19754 - DNA, 330 bp, Glycine max
  unsure at all n locations
tgaatcggacatccgtgtganaagatatgaccatttgaattttgtgcgtctctatatgcgatgctcctgaatcggacatccgtgtgaaaagttatgaccatttgaatttctcaagagcttccgttgcacaatatcgagcctctcgtcatatgatgcgcccgaatcggacatctgtgcgagaagttatgaccattagaatttgacgagaactcacgatgagcaatatcaagcgttactatatgtgaggcgcctaaattggacattcgagttaaatgttatgaccattcgactgtctcaagagcttgcgctgatcaattttgagcgtgtcta

SEQ ID NO: 19755 - DNA, 339 bp, Glycine max
  unsure at all n locations
tctcgatatattatgcacatgaatcagacttccgtttgataagttatgaccatttgaatttctcgagagcattcgttgttcaattntgagcgtctcgatatattatgcaccagaatcggacttccgtgtgactagttatgaccatttgaatttctcgagagcattcgttgttcaatttcgagcgtctggatatattatgcgcctgaatcagacctccgtgtgacaagttatgaccatttgaatctctcgagagctttcggtgttcaatttatagcgtctcgatatgtgatgcgcccgaaccgtacttccgttgacaagtgatgaccatttgaatttctc

SEQ ID NO: 19756 - DNA, 379 bp, Glycine max
agctttcactctcgaagtctggttcaggcgcataatatatcgagacgctcgaaattgaacaacgaatgctctcaagaaattcaaatggtcaaaacttgtcacacggaggtctgattcaggcgcattatatatcgagacgcttgaaattgaacaacgaatgctctcgagaaattcaaatggtcataacttgtcacacggaggtccgattcatgcgcataatatatcgagacgctcgaaattgaacaacgaatgttgtcgagaaattcatatggtcataactagtcacacggatgtccgattcatgcgcataatatatctagacgctcgaaattgatacacgaatgctctcgagatattcaaatggtcataactttgtcca

SEQ ID NO: 19757 - DNA, 450 bp, Glycine max
  unsure at all n locations
ntgatggtgtcgagaagacatcacatgtttgtcatcatcaaaaagggggagaatgtgaatgtatgtatacatgattttgatgatgccaaagaagaatcaaactaagttgcttcaaaggataagcatggctttaagattaatacaagattgattcaacaaacatagccttgcttcaagattaactcaagatcaagcctggccttaaaacaaagtgctttcaagacatgcaaggctctggtaatcgattaccaagcagtgtaatcgattaccagaagacagggttgagaaatagctgttgaaaagggttttgaatttgaattttcaacatgtaatcgattaccatatgtttgtaatcgattaccagtggagagttttcaaaaaagtcatgacacttcacattataactgtgtaatcgattacacaaacattgtaatcaattaccagtggaga

SEQ ID NO: 19758 - DNA, 394 bp, Glycine max
atcttctaaactctatacaagaatgaagctctgataccacttgttagacaattggcctcagatatcttaagaaggggggttgaattaagatattgcaaactattttcccaattaaaattctatttcaatttcaatgcaagttacaaattcccttaaaaatgaactcttaaataatgattcacatcgaacaatctgaatataaatataaagcaataataaataaaagagtttaagggaagagaaagtgcaaactcggatttatattggttcggccacacccttgtgcctacgtccagtccccaagcaacccgcttgagaattccactatcttgtagaagcttttacaagttctgaacacacatagacagttcttcctttgagttcatacttcttt

SEQ ID NO: 19759 - DNA, 435 bp, Glycine max
  unsure at all n locations
tccttaagaagattcctaaagaagctagagcttagctacactcacatctctaatagctaagctcacctccttgagatgagaagctagagcttagctacacaccccctataatagctaagctcacccccatgacaaanaaagatgaaaatacaaaaaaaaaaaagtccttactacaaagactactcaaaatgccccgaaatacaaggctaaaaccctatactactagaatggccaaaatacaaggcccaaacgaaggaaaaacctattctaatatttacaaagataagcgggctcatacttagcccttgggctcaaaatataccctaaggctcatgagaaccctagggccttcccttggatctctagcccaatctacttggagtcttctacccaatgcccttgcgggataggatggcatcaataactttcacatgg

SEQ ID NO: 19760 - DNA, 451 bp, Glycine max
  unsure at all n locations
tctttgaganaacttccttgagaagctagagcttagctactcttacccctctcataactaagctcacctccttgagaagcttccttaagaagattcctaaagaagctagagcttagctacacatacctctctaatagctaagctcacctccttgagatgagaagctagagcttagctacacaccccctataatagccaagctcacccccatgacaaaaaacatgaaaatacaaaaaaaaagtccttactacaaagactactcaaaaggccccgaaatacaaaggctaaaaccctatactcctagaatgaccaaaatacaaggcccaaacgaaggaaaaacctattctaatatttacaaagataagcgagctcatacttagcccatgggctcgaaatctaccctaaggctcatgangaaccctagggccttccttggatctctagcccagtc

SEQ ID NO: 19761 - DNA, 426 bp, Glycine max
  unsure at all n locations
agctntanaagattggctaagattttgttaaattataagcacttagacaatgaaggaaagctggagttgctgcacatgatgtccaacgttatgtcaaggaataagatcgggctgcacaatgcacaaggcaagataaaatgtctaatgaagaattgaagttgcaggatccacgatgtcggatacaatgtcctgacatcctgcccgaaaatactggagttgctgcacaatgcataagtcaagataaagtgtcaaatgaagcattgaagctgcaggatccacgatgtcggatacgatgtcctgacatcttgcccgaaaatactggacacataaatctgttatatctttaacagattattgtgcagttagcaagagattagatgatctatctttaggaacgaattaaaagatcattanagttcgaatttc

SEQ ID NO: 19762 - DNA, 443 bp, Glycine max
agctcgaaacatatagattgaatcctagctcctcttaaggacttagttattatatctgtcaactggtcattagaattgatgaacccagcgataatctccttggacaataatttctctcgaatgaaatgataatcaatctctatgtgtttagtcttttcatgaaagactggatatgacgcaatgtgaagagctgcctgattatcacagtataacttcatttgcaccacttcacaaaattccaactcttggagaaattgtttaatccacataagttcacatgtaaccatagccatagatcgatattcagcctctgcactagatcgagcaacaacagtttgtttcttgctcttccaagcgataacattccctccaataacaacacaatatcctgaggtaaatttgctgtctatgggacaaccagcccaatctgcatcacaatatct

SEQ ID NO: 19763 - DNA, 389 bp, Glycine max
  unsure at all n locations
ttgatgtttgtgttgaatgcattaaaggtanacagaccttatgcacganataagtgcatatagggctacagacgtcttagaattgatacatacgaatatatgtgggtcatttcatacaccttcgtggagtggttgacaatattttatatcattcatagacgattaatccagatatgcatactttgttcttatacatgaaaagccacaatctttggatgtgttaaaacatttaaagtttaagttgaaaatcaactcaacaaaagaataaagtgtgtcagatctgaccgtggtggtaaatactatggcagatatgacagttcaggtgaacaatgtctggngccttttgccaggtatctagaggaatgtggaatcatcccacaatacaccat

SEQ ID NO: 19764 - DNA, 412 bp, Glycine max
  unsure at all n locations
agctntcatatgatggtggtagagaggctaacttaatcatggtagcatcttcatcctctatcttaacatctatatctcttaattccatcaaaatagaattcaattcatcaagatgatctttaagagatgtaccttctttcatgtgtaaaccaaataaacgcctcttcaagaagagcttgttgcagattgacttagtcatatacaacttttccaacttgagccataagccacttgcagtttcttcatttgcaacttcatataaaacttcatcagacaaggaaagcaagattagtgagtgtgccttttcttcttgttctgcaagttcttcagtctttgaaatagaggccttttcttttgattcagaagccacttctttcttcacagatgcagaagcaacaatagcctaaacacc

SEQ ID NO: 19765 - DNA, 414 bp, Glycine max
agctggctacattgatgcatactgactatggcttgtgcgattttggcacttaaatacgggaggctcaagttgtctatcaaagaagatgatggtgagagtactaccctctattaaccaccctaatcaactttgtgaaggaagatgactcagcatgaaagtgataacgagttttccgcaggagtcagactagagctaagaagccgctcgagctaatacatgctgacgtctatgggcccatcaagccatgctcactacgtaaaataattatttcctccttttcattgatgactcttgaagacaaacatgggtctattccgtatagcacaagtcagaagtgttttctgcccttaagaagttcagagctacagtggagaaagaaaatcgcttatttatccacgccatgaggattgaccg

SEQ ID NO: 19766 - DNA, 424 bp, Glycine max
  unsure at all n locations
cgtgggntaaagtctcacaatagtcacgtgttaatgtttctttgttagccgnggctatatgagacatcttgcgaaacaaagtcaggttagccatgactcgcctgtgctttttcttgcatgccatatgtagcaaagtcgttgatccctgcaagtatgatgagcagtgaaatgaggctgcaattatactgtgccagttggagatgtattttccccctgctttctttgacataatgattcacttgattgtgcagtggatgtacccggttgagcgatacatgaagatcttaacagggtatacagagaatcaatatcggctagaagcatctattgttgagaggtacatctgtataagaagccattgacttctgttagaatacattgagaacgctatacctgatgacctctctgagtctcgacatgatga

SEQ ID NO: 19767 - DNA, 438 bp, Glycine max
  unsure at all n locations
tgtccaattganataagctgaanagagcttattctaataatcttttccatcgagtttattgaaacaagttgttcaatagactgcaaaacctttttttttttgtctttattaggattgaataatgcaccaagtttattgttattgctgatgtgcatagatgttgacagggctgatatttggtcttttgggattacggcacttgagttggctcatggccatgcaccattttcaaaatatcctccaatgaaggtatttacatcccgtggttgttcagagacaatgtctagacacatgttaacattggaccgattgaagttcatgtgatataatttgtaataaaagaaaaagagagttcactttttatttcatgtataggttcttctaatgacaatgcagaatgcccctcctggacttgatgatcgagataaaaagttctct

SEQ ID NO: 19768 - DNA, 432 bp, Glycine max
agcttagaaagacattatttcattcataacattatgtaaactagagagccatccacaatatgcgaataaaacatatatgaataattaaaggacatagaacacaataccgaatgtaagtacataccactagccatatatcattgaaggaattaagggtaagacacataatcataaacagccaagagcaggtctatataatcataatgttcaggcatactaagcaagtgttaaaagaaatactacgtgttcaaatgtcataaaaacatatgcaaatacaaggcttacgaacaaatataattataatctaaatatattatccgagaatcaaaacttaattctaagtaacaaaaattagatatgaacacatacatggtaacttattacttatctcgattaatgaaccactagaatgtaagtatcgaataacaatca

SEQ ID NO: 19769 - DNA, 431 bp, Glycine max
agcttataaagataaatgatgacatgattttttcccaatcacactatgttgaaaagctgttgaagaagtttaattattttgatgtgaaacctgtttctactccttatgactcatccatcaagctaaagaaaaatttgggtaaaggaatttcttcacataaatattctcaaattatcggttctttgttgcatttgacaaacttctctaggcctgacattgcatatgcagttggtagattaggaaggtgtactaataatcctgatcattctcattggattgcattagaaagagtttttagatacttaaaaggaaccatcaattatggcattcattatacatgttttcctgcagtaattgaggggtttagtgatgcaaattggatttctgattctgatgaaacaaaatcaacaagtggttatgtttttacttta

SEQ ID NO: 19770 - DNA, 447 bp, Glycine max
  unsure at all n locations
agcttaagctctntcaactgcacaagcctcttgttatttgaagagtatccttgtggaaccttcacccaacgaagacactgacaaaaacttatcttctccttcttggacaaagtatggcaggctgngggcaagtaaattttcttcccatcagaccttggatgcaactgtgatcgtatacccatatcagctagatcttgacgggtattcaagccatccttcgtcttgccttgaatgttaaggagcatcccaatcacactgtcacaaacatttttctccacatgcataacatcaatacaatgtctaacgtcaagatcacaccagtacgaaagatcaaagaaaatggacctcttcttccatatgcaactctgactnttatccttcttttgggtcttcccaaatacagtattcaggtgttgaacccattgatatacctgctcaccagtcaac

SEQ ID NO: 19771 - DNA, 397 bp, Glycine max
agcttaacaagtggaatcagaggaaagtctctatggcaggcttaattactttaattaattctgttctgacagccttgcctttattttatctgtctttcttcaaagctccttcagcagcgttagtgaggctgacttcaatccaaaggaattttttgtggggaggaggtgctgaagggaaaaagatcgcttggatggcttgcgatcatatatgtactcctagaaatcaaggaggtttgggtatcaaagctatcaaggatcttaatagagcccttcttattaaatggaagtggctgatgtttcaccaatcagaccaattgtggtgcagaatcctcatctcacaatacacacgatggagagggctggaagagaattcccacaggcagtctcattccttctg

SEQ ID NO: 19772 - DNA, 285 bp, Glycine max
gcgcctatgacagtggcaagccctgaacgaatgattcttgcctatgttgtggcgggctagtcgcacagaactacctcgtgtcaactatactcagagatgcaatctgacaccttatgacacatatcaggtatatattgtcatgactttcaagacatacttactgtggcctcgagagattcaggactgaccattgcccatagtatgaacacatctcgcctactgcattacgtccatacgaaggctccagtcacgagttctctgctaccattgcaccacgacacagtg

SEQ ID NO: 19773 - DNA, 445 bp, Glycine max
  unsure at all n locations
cgcttgagctggtatctgngttaaaaaanaattcgcatttttctttgttggagcaattgggaagaatgagcagtggcagatggaggcagctagatacctgaactgtggagttctgtcctttccttttgcatacttgggtatccccattggggataatccaagatgtagtgatctttgggatcctatagtcagaaaattcgagagaaaattagcttcttggaaacaccaacatatttcatttggggggagagtgacactcataaatgcagccctagcagcaatccctatctactttttttcctttattagggtaccttcaagagtaatatccagattggaagcaattcagaggcaatctctatggngaggaggtatggatcagagaaagattgcttgggttaattggaaaacagtctacaatccaaaggatatatgaggacttggc

SEQ ID NO: 19774 - DNA, 402 bp, Glycine max
  unsure at all n locations
atggaagtactaagtatttattacctatacttaacagaaaatacttataacacaacaaaataaccataaattggaagagtttgatacaatttacacaagttttatacacaaaagttagtcgtgttcaccgactaacaccatgcagcgcaaagggaagcatctcgtgccaatccttgtatgacacggtcatcttctgaactatatcttcttgatattnttattagcggcctcaactgcctcattcatcttaagccagtaaggcatggaattatggtgttagatnttgaaatcctcacacatctccttcatcatcttgttgttcagattggtggcattgaaggtgataattttccttagcaacccatatcggcaaattatctcccttntgatgaaactaatcac

SEQ ID NO: 19775 - DNA, 302 bp, Glycine max
tatgttaatcaattagactttatccgtatccttgtggatgtataccttgaatactgccatgtagttgttgaacatggtttctagtaatgtaattccaaagacacctcttgagctgtagacaaataggatacctactataatgcacctgcatgtatggggttgccaggcagatataacgatttataatccgcaagaaagaaaattggatgcaagaacaatcagtggatatttcattggttatccagaaaagttaaaagggtgtatgttctattgtactactcatagatgagaactgacaaact

SEQ ID NO: 19776 - DNA, 451 bp, Glycine max
  unsure at all n locations
ntgatgaaagtgcagtctgaaggtagccaaatacgccttctatgcttaacgaagttgggcgttaacacatgatcagggtagtctgctgggttcgcatgaaccttctcccttaaagtgatgaagtcattatgcgactgcaactccttatagagatcttcaagaaacacaaaatgaggcattgagaggatgaaacatgaggtactaggtaattctgaacatcgcgataacgcgtctgcaaccatattagttttgcctattcgatattgtatagagtaatcaaatcccaacaatcgtgccaaatatcagtgctgttccagcgtttgaatggcctggctcatcaattctttcaagcttctatgatcagtcaggattataaagtggtgccccataaggtattgcctccatttcttaacagcagtggtaatcgcagtgagttcacgaacataagtgg

SEQ ID NO: 19777 - DNA, 434 bp, Glycine max
agctgtgccgtgatggtgcatttgaaattggtgattgggtttatgttcgccttcgtccctaccgccagacgtccatagcgtcgacttacaccaagctttccaaaagattttatggcccattccaggtactggatcacataggcccagtggcttacaagcttcagctgccactttcttcccgcatacatccagctttccatgtatccctcttgaaaccgcatcttgggccatcctcgactacaactgccacattgccatctacagggaacaaccaccaactcttggtctctcctttatccattctggattggaagtgggaccattcatcttccccacctaacaagaaagtccttgtttagtgggatggcttagcatcgaaggatacttcatgggaactatgggacaagctgcgtgttgcctatgaccttgaggac

SEQ ID NO: 19778 - DNA, 450 bp, Glycine max
  unsure at all n locations
tgttagactgtttcatacaagatatggaaacaaacaaatattcttctatatcgcangtctcccagaacaggtcagaactttgaaacatatatgaatatgatgatgactatgaaactgatattgattccaataaagcatccatgtactctttaagtttcaattttgtaattgcaccttccattctgctttctggaacttcctgcccgttcttgaagagtattaatgtcggtagtccataaactttatactcttaaattacttgcgggttgacatcatgatcaatctttacaaccgttaatctgtcttcatattcctgcaagttattattataaaaaataatcatggtccaggggagacaaattaagatcctaaagatcacttgacaatagttcttaggaaaatcatactatttgtttcacaccatgctatccccaccatatatagcctata

SEQ ID NO: 19779 - DNA, 365 bp, Glycine max
  unsure at all n locations
tctcgatatgttatgcgtctgaatcggacatgcgagtgtggttttgtgatcatnttaatatcccgagagcttccgttgttcaatttctagcatctcgatacgctatgtgcctgaatcgggcatgcgagtgaaaagttatgaccatgtgaatttctcgagagcttacgtagttaaatttctagcggcatgatacactatgcgcgtgaatctgacatgcgagtgaaaagttaagagcattttaatttctagagagactgcgatggtgaaagtcgagcgacatgatgtgtcatgtgcctgaatcggacatgcgcataatacgttatgaccatatgaatctctccggagcatctgtcgtgcaattacta

SEQ ID NO: 19780 - DNA, 424 bp, Glycine max
tgatttcttggcctgcttgtgctcctttttcggtgttctgtttatttcagtgcctttaggccttggaatagcggtaagataggaattccttaatctgcttcctgccattagaaacctaaaattcattgtatgctaatactatgtgtttaatattactgacttcgccaaaatcttcaggtggcaatatcagtcttcaagatcttgcttcatgtctctaggccaaacacactggttttggggaatataccagggacgccaatattccacaacctataccaatatagagaagctttgaggatcccttcatttatcattttggctgttgagtctcccatctactttgctaattcaacgtacctacaagaaaggttagataaagcgacttgtagattggcgatttgtgaatgcttactacatttcaaat

SEQ ID NO: 19781 - DNA, 439 bp, Glycine max
  unsure at all n locations
tgtgccttttcacgtctggaatatgaatgtagcatatagattcaaagacccttaggtgctttgttgatggcttcttcccgatccaagcttcaattggagtcttgtcttttacagacttagttggacatctgttgagtatgtaaacagcagtgtagactgcttcagcccagaatgtgttaggtagtcccttctccttgagcatcgatctagccatctccataactgtgcgattctttctctcggacactccattttgttgagaagaatatgcgactgtaagttgtcgctcaatgccttcatcctcacaaaatctttcaaactcgcgagaggtgtactctttgctgcgataacttcttagtacttttatccgttttccactttgattntcagcaagggccttgaactttttgaatactccaaagacttctgattnttcttt

SEQ ID NO: 19782 - DNA, 439 bp, Glycine max
gatctctaagcgactgagcatgcaagctttgtactccactaaatttgccttttgttgaccaaagctaataccgctgacaaccttgtgaaagctgtgcacccaggatacaaaggcatctttgaatcattttctattttctcatacaaaggtacatgtgcttgttgaaatctgtcctgccccaaattgcaaatcatgtcttctatacggtatcccatgtctacatcgactgactcagggtgagagactgatggcttgtttggcaattccccatgccatatccattttgtgtaatttggaatgatcctatgacatatattgactggtgtctcctattcccacattttacgcatggacagaaaaatttaccccgcacacatggtgcattgagtttagtaaattggaggaattggtcaactctattctcatactcgtcactgat

SEQ ID NO: 19783 - DNA, 429 bp, Glycine max
agcttgacgactgtggactgattatattctcttatgaaatgatgatcaatggcaatgtgcttagatcgttcatgatgagcaggattcgaagcaagacttatagcagatgtattatcacataataacatcgcagatggcacatcaacttcagagtgaagaagtaacctgtgtaaccaaacactttcactattaacacacgacaagacacgatattcagctatagtggatgattctgaaacagtgggttgtttcttagaacgccaagaaagaaggttggttcccaaaaagacacaatagccagaagtggatcttctagtatcaacacaattggcccaatcagcatccggacaggcactgaggtcgagagagttctgagcacggaataacaaaccttgtccaggagcacatttgatatactgcataagatga

SEQ ID NO: 19784 - DNA, 405 bp, Glycine max
  unsure at all n locations
agcttctaaactntatacaagaatgaagctctgataccacttgttagacaagtggcctcaaatatctacagaaggtgggggggttgaattaacatatcacaatcttttctaaattaaaaattctattttgattctaacccatatcccaagatttctttcaaaaatgaactcctaaataattatgcaaattaatcttactaaatagaaacaataagcaatatacaataaaagagtttaagggaagatagattgcacactctgatttatactggtccggccacacccttgtgcctacgtacagtctccaaacaacccgcttgagagtttcactatcttgcaaaagccctttacaagttctaaaccacacaaggacaacccttcctttgtgttaaaattctttacaac

SEQ ID NO: 19785 - DNA, 443 bp, Glycine max
  unsure at all n locations
tgaaggtgtgtagcccaccatcttttcatagttgaatattgttaatgtgtctactattattgtcatcatctttttctccgtcattgaggtgccacttgagctgccaggtctctccacctttgggcgtattcttttgaagaatttgtgccccctttttgcacatgttttgtagttgcatcctatccgaagccattataccgacactgcctaacgaaggcaaccattaggtcctcccaggaatggactcgggaaggttccaagttagtgtaccaggtaacaactaccccagtaagactttcttggaaggaatgtatcaacaattcctcttcttttgcgtatgcccgcatcttccgacaatacatctttagatggttcttggggcaagtaatccccttgtacttgtcanagtccagcaccttgaacttgagaggggtgatgatatt

SEQ ID NO: 19786 - DNA, 281 bp, Glycine max
tcgaacaacagaagctacgagaactacaatggtcattatatgtcacacggaagtccgattcaggtgcataatatatcgagacgctcgaaatacaacatcggaagctctcgagatattccaatggtcataacttgtctcacggatgtacgagtgacgtgcataatgtatcaagaagctggaaattgaacaacgaaagctctcgagaaactctgatggtcataacttgtcacacggacattcgacacacgcgcataatatatcgagacgctcgaaattgaaca

SEQ ID NO: 19787 - DNA, 246 bp, Glycine max
agctcgaatttgaacaacagaagctcttgagaaattcaaatggccataacttatcacacggaagcccgaatcatgcgcataatatatcgagaccctcgaaattgctcatcaggaagccctcaagaaagacaaatggtgataactcttcaaacggaagtcccaatcacgagcatatatatatcgagaagcttgaaattgaacaatggacgctcttcagaaattcagtcagtcatatctcatcacacg

SEQ ID NO: 19788 - DNA, 470 bp, Glycine max
  unsure at all n locations
ttacgagcgtctcganatcctacgggactctattggtcatccgagtgaaaagttattgtcggttgaatttgtttagagcttatgttttcaattacgagcgttttgatatcccacgggacacaatcggaaatccgagttaaaagttattgtcgttagaattttctcatagcttccgttttcaattacgagcgtctcgatatcctacgggacacaatcgaacatccgagtcaaaagttattgtcgtttgaatttgctcagagcttcagttttcaattacgagcgtgtggatatattacaagactcaatcagacatccgagttaaaagttattgtcgtttggactttaatagagcttctgttttcaattagagcgtctccatatattacgagactatattagacatccgagtcaatagtatggtcgtttactttcacagagcttgcgtgttaatttgagcggccgatatatat

SEQ ID NO: 19789 - DNA, 405 bp, Glycine max
  unsure at all n locations
agctttgaggaaattcaaacgacaataacttttgactcggatgtccgattgtgtcccgtagtatctcgagacgctccaaattcaaaacagaagctattagaaaaatctatggacgataactttttacacggatgtcccattgagtcccataatatatcgagacgctcgtaattgaaaacagaagcgctgaccaaattcaaacgacaataacttttgactcagatatccgattgtgtcccgtaatatatcgagacgctcgaaattcagaacaaagctattagaaaaatcaaacgacgataactttntacacggatgtccgattgagtcccataatatgtcgagacgtttgatattgaaaactgaagctctgagaataatcaaacgaccataacttttaactcggat

SEQ ID NO: 19790 - DNA, 469 bp, Glycine max
  unsure at all n locations
tgtagaaaatcganacgacaaannattttatctaagatttccgaataaattccgtagtatatcgagacgctcgaaattcaaaataaacctctcagcaaaatgaaacgacaataactttttactcgaatgtccgaatgaatcccgtaatatatcgagacgctcgtaactganaacagaagctctgagcaaattcaaaagataataactttttactcgtacgtccgattgtttcctgtagtatatcgagaccctcgtaattgaaaccagaagcccgtagcaaactcaaacggcaataaatttttactcggatgcccgaatgaatcccataatatatcgaggcgatcgtaattganaacagaagctatgagcaaattcaaacgacaataactntntactcggatgaataccgtaatatatcgagacgctcgtaattganaacaaaagctctgagcacattcaaacgacaata

SEQ ID NO: 19791 - DNA, 424 bp, Glycine max
agcttctgttttcaattacgagcgtctccatatattacgggcctcaatccgacatcggagtaaaaagttattgtcgttagaatttgctcagagcttctgttctgaattttgagagtctcgatatactacggaacacaatcggacatctcagtaaaaagatattgtcgtttgaatttgctcagagcttctgttcttaattacgagagtctcgatatattacgggattcattcggacattcaagtaaaaagttattgccgcttgaatttgctcaaagcattcgttgtcaattacgagcgtctagatatattacgggattcattcggacatccgagtaaaaagttattgtctttttatcttgctcagagcttctgttttcaatttcgagcatcttgatatattacatgactcaatcggacatccgag

SEQ ID NO: 19792 - DNA, 403 bp, Glycine max
  unsure at all n locations
tataagtgaggcctngtgagaggatttgtccaaaccctcctatatcagtacttgtagtaataaagctgacactactactactaaggcaaggataagatgcagcatcgaccaaagctntctgaagaacaaatctgttaagggtaccacggaacttcttgaacagcatgtgtggaggccccagagagggttgccagagcgtgcagtggcaattcttaaagcctggttatttgagcattttcttcatccgtatgttagtctctatctatgtctcttattaatatatttcttgcttcgtgactctcttttctgcattctaaagagacatttggattgaattgtgtgctttttttgctgatgttgaatatctctttcattaccctacagacactgattaacacatgct

SEQ ID NO: 19793 - DNA, 412 bp, Glycine max
agcttatataggaagcttcaaaggagaaacaaaatgagagagaggggaaaaaagtgacatgggaatgaaggaaagatggggaaagaagttgaactttgactcgtatgcaatatcatacttcgagagttcaattgaccatgtcatcatttgtctgactaactcaggcttgcgtaatatcttgcctattgggcaatcagtttgaacagtgatcttgtggctctgaaagtattgtcgaaggtagcaagcggcgttgaccagtgtgagggctaccttttccatcacctgttacctcgtctctagatcttacagctcccgacttacaaagtatatcgacctctgctatcttccttcctcttgtatcaataccacgcttatggcctcgatcgagatcgacaggtaaacaatcaatctt

SEQ ID NO: 19794 - DNA, 427 bp, Glycine max
  unsure at all n locations
agcttatgctacaaacatctacaacagacctcctcaacctcagcagcaaaatcagccacaacagaacaattatgacctctccagcaacaggtacaatcccgggtggaggaataatcccaaccttagatggtcgaatccttcacaacaacagcaacaacaacaaccttattttcaaaatgttgctagcccaagcacaccatacgttcctccaccaatccagcatcaacagcagcaacagccccagaaacaacaaatagttgaggctcctccgcaaccttcccttgaagaacttgtgaggaaaatgactatgctaaacatgcagtttcaacaagagaccagagcctncattcagagcttaactaatcagatgggacaattggctacacagttaaatcaacaacagtcccagaattctgacagattacct

SEQ ID NO: 19795 - DNA, 489 bp, Glycine max
  unsure at all n locations
nggttcccaacgctttgttcanactctcccanaacctagaggttttatagaatctctatcagacactatgctagatggcacaccatgtaatctgacagtctcactaatgtacagggaggtcaacttctctaaggaaaacctaatattgatggggataaagtgtgtagatttggtcaatctgtcaacaacaacccaaatagaatcaaaacctttgggggtcctaggtagtcctacaacaaaatccatggggatactatcccacctccactgnggtatctctaatggttgtaacttacctgaaggtctctgatgttctatcttagccttctggcagactaaacacgtatacacaaactcgttaacctctctcttcatgttgggccaccanaacattatctttagatccggattcatcttggtagcaccaaggtggatgctcanngtgctcctatgaccttcctctaagatcatcttcctatgttcggcaca

SEQ ID NO: 19796 - DNA, 407 bp, Glycine max
agcttagactgagttcatcctaccatcctcagactaatggccaaactgaacggaccattcattcgttggaggaccttttaagagcatgtgtcttagagcagaagggaagttgggagagttttcttccattgatagagttcacttataataacagttttcactctaccattagcatggctccctatgaagctttgtatgatagatgatgtacgacacccctatgttggttagagcccggagaaggcctcaccttatgaccagacgtggtacaacaaaccactgagaaagtttagttaattcaggaaaggatgagaactgctcacagtacgtagaatagttatcatgataagaggaggaaagaattggaattcgacgttagcgatcatgtattcttgagagtcactctg

SEQ ID NO: 19797 - DNA, 411 bp, Glycine max
  unsure at all n locations
tgtcatcgattaccagaggacattntcagaaaattatttctatgagtcacaacttttcaaatggctcttacatggccatcaaaggtctatttatatgtgacttggaacacanatttgctcacaatttttcagaacaaaaaggttttatcctctcaaaaagcaaaatcttcttatcctcttaagattccttggccaatacacttgcaattcaataaggatttatttgagtgctcaaattgttcaatctatctctttcaagagagatttcttcttctcttcactctaattctcanaaagggattaagagaccgagggtctcttgttgtatagaaatctgaacacanaggaaggattgtccttgtgtggttcagaacttgtatagggatttacaagatagtggaactctcaagc

SEQ ID NO: 19798 - DNA, 342 bp, Glycine max
  unsure at all n locations
gtggttntcaattacgagtgtcgcgatatcctacgggactcttttgacatccgaatcanaagttattacgtttgacttttcctagagctcccgttttcaatttctagcgtctcgatatattaaggggctcaatcggacatccgagttaaaagttattgttgtttgacttttcttagagcttccgttttcaattttgagcgtctcgatatattacagggctcgattagacatccgagttaaaagttattgtcgttagatttttctcagagcttccgttttcaattacgagcgtctcgatattctacgggactcagtcggacatccgagtcaaaagttattgtc

SEQ ID NO: 19799 - DNA, 403 bp, Glycine max
  unsure at all n locations
agcttagagttgataagtattctagcttacaaacttcattggatactggaacagctaaaggcttaaccaagggaaaaagagtcatcttaccctcaacgtttgttgggagcccatgttatatggatcaactttactttgatggtatggcaatatgcagtcatgttgggtctccaaatctttttattactctaacctgtaatccaaattggcccgaaattcgtagattactttcacctttgaatctcanaccaacagacaggccagatattgtatcacgaattttcagattaataaatataaacacatgctgtcagacttaacaaagggtcaattactgtgaaaagtggttgcatgtaagttgaccatcatctttatacttaaatacaaatataagttggtcatt

SEQ ID NO: 19800 - DNA, 507 bp, Glycine max
  unsure at all n locations
tattacggacactatagatactcagctanacattcaatttcgagagtctcgttatattacgggactcaatcagacatccgagtaaaaagttattgtcgtatgaattggcttatagcataaacattcaactttgagcctctcgatatattacgggactcaatcagacatccgagtaaaaagttattgccgtttgaatttgctcagaggttcaacattcaatttcgagcgtctcgatatattacgggactcaatcagacatccgagtaaaaagttattgtcttttgagttggctcagaggttcaacattcaatttcgagcgtcccgatatattacgtcactgaatcggacatccgagtaaaaagttattgtcatttgaattggctctgagcttgaacattatattacgagcgtctcgatatattacgggactcaatcagacattcgagataaaagtattgtcgttgaattggatataagacaacattcaattcgagcgtctgatatata

SEQ ID NO: 19801 - DNA, 342 bp, Glycine max
  unsure at all n locations
agctttatgccaattcatacgacaataactntttactcggatgtctgattgagtcccgcaatataacgaaacgctcgaaattgaatgcttaagctctgagccaattctaacgataataactatctactcggatgtccgattgagtctcataatatatcgacacgctcgaaattgaatgtcgaagctctaagcctattcaaacgacaataacgttctactcggatgttccattcagtgacgtaatatatcgggacgctcgaaattgaatgttgaacctttgagccaactcatacgacaataactttttactcggatgtctgattgagtcccgtaatatatcca

SEQ ID NO: 19802 - DNA, 374 bp, Glycine max
  unsure at all n locations
atgaagtggctngacctttccatactgagtatcatggactgtattctcctacttttggaacattattttatctcgaatatctagacttgtcttcaaacaagtttgaaggttcaattcctcccaaattgtgtgctctaaggagcctcaaaacattgaacctttccaataactcgctggtgggagagataccaaacgaacttcatggccttgagagtctacaggattttcatatattcaacaatcacttgagcggtttgataccatcttgtgtagggaattggaccaatctgagagttgttgctgcttatgagaataattcctatggaacgtgtacaagtaaacttggatctatttatgagcttacaacacttaac

SEQ ID NO: 19803 - DNA, 233 bp, Glycine max
  unsure at all n locations
tatgaaagctcttgagcatgtcgaatggtcatatctttcacacgacggtcagactcacgtgcataatatatcgcgacgctcgaaactgatcaacggaagctctacatacattcaaatggtcatacttgttactcggacgtgcgaatcatgggcataatatatccagacgcttgaaattgaacaacgcgaactcncgagaagttcaaatcggcataactttttactatgaggtc

SEQ ID NO: 19804 - DNA, 389 bp, Glycine max
agctttatctagataagtatgatcagggtttttcacaaactgagtagcacatggatttttctcaaaacatgtttaccaaagagttttactctctggtaatcgattatcagattattgtaatcgattaccagcatccaaatggatttgaaaaagctttcaaactgaatttacaacgttccaattaatttcaaaaagctgtaatcgattacaatcttttggtaatctattactagtgccattgaacgttgaaattcaaatttatatgtgaagagtcacatcctttcttataaaagccttgtgtaatcaattacactaatttgataatctgattaccagtgattgttactgaataaatcacaagatgtaactcttccaaagggtttgacttt

SEQ ID NO: 19805 - DNA, 370 bp, Glycine max
  unsure at all n locations
ccagggtgctggaactacttcattttgacttgatggngcctatgcatgttgaaagccttggaggaaagaggtatgcctatgttgttgtggatgatttctccagatttacctgngtaaactttatcagagagatatcacataccttctgagtattcaaagagttgagtctaagacttcaaagagagaaagactgtgtcatcatgagaatcatgagtgaccatggtagagaatttgataacagcacgttcactgaattctgcacatctgaaggcatcactcatgagttctctgcagccattacaccacaacagaatggcatagttgacaggagaaacttgaccttgcaagatgctgctctgcgcatgcttca

SEQ ID NO: 19806 - DNA, 426 bp, Glycine max
  unsure at all n locations
agcttgcaaagttagaaatatcttgtttgattccgatgttgtgaagtcaaggaaagatttttctattgccatgatgaggtcatctatagttttaggagcctctttgtgttgtaatgactgaatggcattaaagaagccaagatctaagacattaaaatcaagcaagtttgggggttgagaaaccaatcgaatgtcaaaaccgccttcactagcagcttaatggaagtcgttgtcatcttcatcaatgtgacatggagcattgtcttgttgtatgaaaatagtctctcctctatccnctattggccattttgctttgattgcagacaacacatgatgaataagaanatgtttgcttacttgtttaattattgaagatattggttntgttccatagtccctgtatctcttgttgcactccttctcttt

SEQ ID NO: 19807 - DNA, 405 bp, Glycine max
  unsure at all n locations
ntgagcaaattcaaacgacaataaagttttactcggatgtccgattgagtctcgtaatatatcgagaagctcgaaatggaataccaaagctctgagcaaattcaaacgacaataactttttactcggatgtcttattgagtcccataatttatcggaacgctcgaaatagaataccgaagctttgagcaaattcaaacgacaataacctttttactcggaagtcggattgagtcccgttatatatccagacgctcgaaattgaatgttgaagctctgagcaaattcaaacgacaataacctttatactcatatgtcggatagagtcccgtaatatatcgagacgctcgaaatggaataccgaagctctgagcaaattcacacgacaataactttatactcggatg

SEQ ID NO: 19808 - DNA, 376 bp, Glycine max
agtctttgtattcaatttcgagcgtgtcgacatattacgggactctatcagacatccgagtaaaaagttattgtcgtttgaatttggtcagagcttcgataatctatctcgagcgcctcgatatattacgggactcaatcatacatccgagtaaaacgctattgtcgtttgaattcgctcagagcttcggtctttaatattgagcgtctcgacatatgtctggacttatctccacttccgagtaaaaagctatttgggtttgaatttggccagaacttccggattcaaattcgagcggcacgatttattacgggacttaatctcacatccgaatcaaaattattgacgtctgatttgccagaacttcggtattcat

SEQ ID NO: 19809 - DNA, 459 bp, Glycine max
  unsure at all n locations
attgagtccgataattcagaatcttcatctggcaattgtgttttggaggcatggaagttaccaggagtggctccgtttgctttctgtctctttttctcgaagctcgtggcttacactnttctgtactggttgcccttctacataaggcacacaggtaatcattattattatattacatgaaaaattatgatatatatagagttgcattgccttttatctaacatcagcatgttattcatatgcgaagaatttattactagtgtcttcatattcctgatatattgtctcaagggtttgtcactacgaatttggagtgcttgtttggtaggactggtatgtgatgtgtctttaggcagatatgaatctgtgtgacaggtattgcatggcggtttattagcatgtatggtgcaatttgaatctggagaaataattgtatattttcacaagctctctcagcta

SEQ ID NO: 19810 - DNA, 357 bp, Glycine max
  unsure at all n locations
agctntttcttatggtctgtaccacacattattataacgaacacccttaatgtcataaaccataagtttatgattaaaaaaaatgttgtttagcatgacctattaggtcatcccatgtcaactataatgtggaaaatatttaaaaattcatgtggacatccatggaagagccagaagattcttcagtccaatgatttctcatgtactatttattctcaaaggaagttggtaattacactatcaccaagaaaaattggaaatgagtctattttatttttagaacggatataatgtgatatttgtggatcaatatattcaccatatggatcatttagatatttcatgatgcatcaacta

SEQ ID NO: 19811 - DNA, 449 bp, Glycine max
ctcatgagagagtcaaagatcaaactgagaggagatataaaagctatgtctttctagccaacaaagggagaaagaaggttgtcttcgaacccggagattgggtttgggtgcacatgagaaaagaaaggtttccggaacaaacgaaatcaaagcttctaccaaggggagatggaccatttcaagtgcttgaaagaatcaatgacaatgcttacaaagttgagctgcccggtgagtataatgttagttccaccttcaatgtctctgatttatctctttttgatgcagatggagaatccgatttgaggacaaattcttctcaagagggagagaatgatgacgacatgttcaagagcaatggcaaggatccacttgaaggacttggaggacctatgacaatggctaaagcaaggaaagcaaggaagctcttcacaagtgctgccatactattt

SEQ ID NO: 19812 - DNA, 429 bp, Glycine max
  unsure at all n locations
agcttcttcacatagtccgcctttgcttgaccttctttatgcttaanaacagaaacattaggcataggcaaaagatcaagaggagttagtgggttaaaaccataaacaacttcaaaaggagaacaattagtggtgctatgaacagctctattgtaagcaaattcaacatggggtaaacaagcttcccaagtttttaagttcttcctcaaaactgtcctaagcaaagttcccaaagtcctattaacaacttccgtttgcccatcggtttgtgggtgacaagtgagtgaaaataacaatttantgcccaacttgctccacaaagacctccaaaaatggcttacgaacttagagtccctatcactaacaatgctccttggcaaaccatggagtctcacaatcttcttgaaaaacaaatcagccacatgggaa

SEQ ID NO: 19813 - DNA, 478 bp, Glycine max
  unsure at all n locations
ccgtatagtttatcaattcaactcgagatttgatataaacatccaaatttcaatgtttccccaatgttgatacagaataacagcgatactcattntaatatacagagagggacatgctatgatacggcaatgatataagagaatatggcaaattgcaacttataaattaatttaaaattaagtttaatcatcatgcactcacaagtttaatggtcaatcaatcataaatctttattaatatataacttttaaggtataatctattttctctttaaaattaatttatttcctttttaaaaataaattagaataaaagttcagattataagagaattcatattctagaaatgaacataagtcaatatatacataaaaatgttaaaacttatataattagtatgagattctaatttatatttggatacaagttaanaaagtatacgtagaaaattatgacaataacataacagtatccata

SEQ ID NO: 19814 - DNA, 423 bp, Glycine max
agctttaatgtccctctggtctttacaccattgttttatagtgtatctcaagttcctcaacttatttttaagggcaattcccccccccccccaaccaccctacagatctgtattccaagcctctttgatcatagagtggtaccctttatgattaagccaccagtccacaacccgaaaaggcttagggccccagtccaccatccttgtcttcaaaatgattggacaatgatcagaataatctctttgaaggacatgttgggaagtatcaggccacaaggataaccactgatcagacaccaagaatctgtccagcctactcttggcactgccattgagcctaaaccaagtaaaatagctgccaaagcatctaatatcatggagctccatctttgatatccagtcattgaaatctgaggtatctga

SEQ ID NO: 19815 - DNA, 401 bp, Glycine max
ttcgagtgcctgtatattgatgcgcctgaatcggacatacgagtgacaagttatgaccatttgaatttctcgagagcttcctatgtttaattttgagcgtctcgatatattatacgcctgaatcgaacctcagtgtgaaaagttatgaccatttgaatttctgtagagcatccgttgttcattttcgagcgtctctatatgtgatgaaccttaatcggacctccgtgtgaaaagttatgaccatttgaatttctcgagagcttccgttgttcaatttcgagcgtctcgacatattatgcgcccgaatcggacatccgtgggaaaagctatgaccatttgaatttctcgagagcttccgttgttcaatttcgagcgtctcgacatatgatgcgcccgaatcg

SEQ ID NO: 19816 - DNA, 240 bp, Glycine max
agcttgaatcggacctcagtgtaaaaagttatgaccattgaaatttctgcagagcatccgttgttcattttccagcgtctctatatgtgatgcaccttaatcggacctctgcgtgaatagttatgaccatgtgaatttctcgagagcttgcgttgtgcatttacgagcggcgctacctattacgcgtccgataccgacattcagggaaaaaggtatgaccttatgaattgcacaagagct

SEQ ID NO: 19817 - DNA, 477 bp, Glycine max
  unsure at all n locations
tcaagaattgatggcctcatcatactactagttccctgaacgcaattcaactaatctgcctcccattgttaatggagtgggttaccattattggaaaacccgcatgcaaatcttcatagaggctatagatttaaacatttgggaagccatagaaataaggccttgtattcccaccatggttgctggaaatacaacaatagagaagcctaaggaagattggagtgaggaagaaagaagactagtacaatataacttaaaatccaaaaacataattacatatgccctaggaatgaatgaatactttagggtatcaaactataaaaatgcaaagggtatgtgggataccctacaagtaacacatgaaggcacaacanatgttaaaagatctaggataaacacattaactcgtgaatatgaactatntangatgaatgcanatganagtatgcaagacatgcanaagaggttcacacacat

SEQ ID NO: 19818 - DNA, 471 bp, Glycine max
  unsure at all n locations
taatatatcgagacgatcaanattgaacaacggaagctctcgtgatattaaaatggtcataagttgtaactcggatgtccgattcaggagcttcacatatcgagatgcacgaaattgaacaatggaagctctagagaaattctaatggtcataaattctcacacggaggtcctattcaggcgcttaatatatccagacgctcgaaattgaacaatggaagctctcgagatattcaaatggtcataacttttcactcggatgtccgattcaggcgtatcacatatccagacgctcgtaattgattagcggaagctctagagaaattcaaatggtcataacttttcacacggaggtcctattcaagcgcttaatatatcgagacgctcgaaattgaacaacggaagctctcgagaaacttaaatggccataagttttaactcggatgtccgattcaagcgaatcatatatcaa

SEQ ID NO: 19819 - DNA, 420 bp, Glycine max
agctttccaatgtcttcaagcatcaaatcaatacaatgggctgcacaaggagtccaataaatatgtttccttttgtcctctaacaacttacccgctaaaacatagttactcctattatcagttacaacttgaacaacgttctcttctccaacttcctccacaatagcatcaagcaactcaaaaagcttttcacctgtcttcacaaaatcagagccatcaacagacttcaaaaacattgtaccagcttgagagttaaccaaagaattaatgatgcatctttgtttccgatcagtccatgcttcgaacataatagtacaaccatacttgacccattgctccttgtagtctttcatcagatctttagtgcagtcaacttccttcttcacgagtggaactctgatatcatgacagctcggaatg

SEQ ID NO: 19820 - DNA, 425 bp, Glycine max
  unsure at all n locations
agcttgaccaggaattacttgtatgggttggatgttgaattctggttgttcctggtgcggagatgatggtacagcgggtgaaccagaagcggaagtttcttttggtgaggtagccatggaaaagcagagcgtttggaatgatttcgtaaatttcagaaggctattgggaaatgctggtaaaaacacgaatgccaagcagatataaatttgaatgaggaatgtatagggtcgtgtgaagcaacggtcgaattttccttggttcagtagtgaacgtgctattaatgttaagtgattcgtttgggcacgttcagattgctgtagttgctataattnctctagcacacaaatgcccagcttgcccctcagttnttcaaactgatttgcatccaaagcctttgtgaacatatctgctatttgttcctcag

SEQ ID NO: 19821 - DNA, 483 bp, Glycine max
  unsure at all n locations
ggatgcatacaacctatatgctccaggttgagggggagagttgagatattatgtagattacagagatatatattaagagacatgatacgagttcgatttagttatatcagatttgatttgtatttatgtagatgagatcttttctatagtgtaattaggatcatatttctagtgccattgtatctttagaattacctctattcatgtatcctttttacagtttaatcaatccgaaatatacatacttcttcaattatttcctccagtctcaaatataccatgttgagtgttatcagcaacaaattttcagtataataaagtattactagctatttccagtccagttctatcagaatgtanaagaagggagttaagttcttacaacagcaacaacaccatcatatgagttaagcttcacatttgtcanagaagacatcacatcaaatgcctctcctgctctctctgtcacaatcacctagtaat

SEQ ID NO: 19822 - DNA, 358 bp, Glycine max
atgatgttcgtgttgaacgcattacatgtagacataccacatgctttatattatgtgcatacagagctacatacatcttggaaacgatacatacggacatttgtgggccatatcatacgccttcatggaatggtcaacaatattctatatcattcataaacgattactccagatgtgcatacttgattgatatacatgagaagtcacaatctctggatgcgttcaaaacattgaaagtcgacgtggaacatcaactcaacctttgaatgcactgtgtcagatctaaccgtggtggtgaatactatgtcagatatgactgttcaggtgaacaacgtccagagcctatcgtcacgtacct

SEQ ID NO: 19823 - DNA, 425 bp, Glycine max
  unsure at all n locations
agctntggagtttccaagtgccaattcgtcttcttctttagtccagtcttcttctggcttcaatccatcagtgggctttccttctgagtccagcatcttgggatgttcccagcctttgatgacagctttccaggttctgctatccagtgatttgaggaaggccaccatccttgctttccagtattcatagttggttccatccagaattggtggtctgttcactggtcctccttctttctccatgttcatcagaatttatctccctaggtctcactcagtgatttcgagtgcccgctctgataccaattgaaattctgataccaatgccagatgtcgtacaggatgtcacgacatcacgcttcagaacaagcagattatctctgagtgtatgaacagattatacaagtaaataacacaagagaatt

SEQ ID NO: 19824 - DNA, 436 bp, Glycine max
  unsure at all n locations
ngagagagatctcaagaaccggaggttgcttagggactggatgtatttactggttgttgccgaaccagtataaaattcttgtgttgttcttcttcttccatacactatttaatttccgttgtgtactttacttttatgctatacttttgtttaagttacataacttagtagtaaagcctaattgaatctagtaacattaagaaggatcagttttaattagtcaaggttacttaataattaattcaacccccctattctcaattactccaaggccacttgatccaacacattgtaccctgagcaactgccagatagttcttcttccttttcttttcttttcttaagagctgaatgtaatccatgtacccttatgggtcctctctgatattatgtatgtattcatcttctcacctttatcattagtaattncatttca

SEQ ID NO: 19825 - DNA, 423 bp, Glycine max
agcttgaaggtaaactagatgccttggttaacctggtaacccaactggccatgaataaaaaatctgcacctgtcaccagactctgtggtttatgctcctctgccgaccaccacacagacctttgcccttatgtgcaacaatctgaagcaattgaatagcctgaagcttatgctgcaaacatctacaatagacctcctcaacctcagcagcaaaatcagccacaacagaacaattatgacctctccagcaacaggtacaatcccgggtggaggaatcatcccaaccttagatggtcgaatccttcacaacagcaacaacaacaaccttattttcagaatgttgctagcccaagcagaccatacgttcctccaccaatccaacaacaacaacaacaacaacaacaacagcaacagccctagaaac

SEQ ID NO: 19826 - DNA, 431 bp, Glycine max
  unsure at all n locations
ntgatgcaacatatggagaggttaatgaaacaacgagatgatgttctccatgagaggctggatcacatggagaatatagatcataatgaagaagacaggagtagaagagggaatgatggtgttcctagacaaaactgaattgatgatattaaactcaacattcctccatttaaaggaaagaatgatccagaggcctacttggagtgggagatgaatatagagcatgttttctcatgcaacaactatgaggaggaacaaaaggtgaagcttgccgtcacggagttttccgactatgttcttgtgtggtggaacaagctacataaggagagagcaagatatgaagagccaatgtgtgatacatggatggagatgaaaaagatcatgatgaagcggtatgtgccggctagttactcaagggacttgaaattcaa

SEQ ID NO: 19827 - DNA, 424 bp, Glycine max
  unsure at all n locations
agctttatatgattggctaagattttgttaaaacataagcacttatacaatgaaggaaagctggagttgctgcacaagatgtccaacgttatgtcaaagaataagatcgggctgcacaatgcacaaggcaagataaagtgtcaaatgaagaattgaagctgcaagattcacgatgtcggatacaatgtccaggacatcctgcccgaaaatactggaattgctaaaagcattgatattgctcgatccacgatgtcggatacaatgtccaggacatcctgcccgaaaatactggagttgctaaaagcattgaagttgcaggatccacaatgtcngatacgatgtccaggacatcttgcccgacaatactggacatataaatctgttatatctttaacagattattgtgcagttagcaagagattag

SEQ ID NO: 19828 - DNA, 426 bp, Glycine max
gcttgttatgaagatgataaaacctatctcttactagatgtcagctagttgtgagtctgtatccataaactcaatgtcacaatcacctttgtgaatatgatccctaatgaaatgatgcttaatatttatacgctctgtcctagaatgcatgatacgattcttagtgatactaatgacactagtgttatcacatcttaaaggaatatgtcctaaatgcaatataaagtcagaaagttattgattaagacacaagatttgtgcacaacaacttcacacaacaatgtactcagccttatctgtaaacaaggcaacacatgctcgattcttactattccatgaaaccaggccattacctaacaagcggcaaatactactagtgcttctcctatctagtgtaaatctggaaaagtttgaatctgagtattc

SEQ ID NO: 19829 - DNA, 386 bp, Glycine max
agcttgacatatttaacatacttaggaactttttttgtgcggtgggaattctctaattgtatcatgtgggccttttgaaagtaacaaacagaaggccagtctgttgcaagtttgctgctgaacatcacattccaccctaagaaaacacaaggtggattgcatcgagggtggataccttaccttagcacagaaggaaaaagtatgtcagtgcaaagtatggactaaactgctttcaggaaaaaagttgtaaaaattgatacaggttggaaaagggaattttccttcccggcttggagtcctcccaatttaaggcagaacccatccactccaatttctgcagtttaaaactttctctacttatttagttgtctcctctgagttcaacc

SEQ ID NO: 19830 - DNA, 387 bp, Glycine max
agcttgcttcttgatgaaatggctataaatgcattaaggatctatatagtattacaacaacaacccaacactgtcgatgcgtactttggaagataggtaacatctcggcattcataaagtctgtcgatctttatttggaaagatttgctccctctccgacttgggtaatgaaagcatgggaaacaactcaagatgaaacgatgactgctggtgtgttggatgctgtggatttcaacacattcggtgtgttcaacttgttcaatcattctaaaaccgaaacctcttgaacctttatgtcttatattgtggcatgctatggtgaaatggttatactataagtttaatctgaaatcacaagatgcaacctacttgtgaagtatcctaatc

SEQ ID NO: 19831 - DNA, 365 bp, Glycine max
agcttagtctggctggatatgaaattctgggttgaaaattcttttctttaagaatgttgaattttggcccccactctcttctggtttgtaaggtttctgcagagagatccactgttagtctgatgggtttccctttgtgggtaacccaacctttctatctggctgcgcttaatattttttccttcatttcaaccttggtgaatctgatgattatgtgtcttggggttgctcttctcaaggagtatctttgtggcattctctgtatttcctgaatttgaatgttggcctgtgttgctaggttggggaatttctcctggataatatcctgaagagtgttttccagcttgattccattctccctgtca

SEQ ID NO: 19832 - DNA, 400 bp, Glycine max
  unsure at all n locations
agctttgctggtcttaccttatctccttttggtccataaggtcccagaaggcctgngaaacccctttctcctttcaatcccgataaaccagtagagccagtgaatccttgaggacctgttgggccttgaattccaattggtccaggtcgtccctaaggtggacagaaggagtgcaattagtcaatagaggacttagcattaatacttctcattttcccacgcacaaagagcactgtcataacttcactgaataattttggctaagagatctgtgaggcacgccaaagttccagacacggatcagaaaaggctattttagggattgctaagcttatttggatagaacacattttataagcacatttaataagattcatgtgcaccaagatccttcaacttt

SEQ ID NO: 19833 - DNA, 392 bp, Glycine max
  unsure at all n locations
agcttgatgaaattcaggatagcacagaaacaattcagaatactgtcagacaaatttacaaagagatttaattaatttttaacaattatgcagacattttttaaatgaaaaacttagttgacatactgcagaatgcatcagagtctcttactggcagaattgatcaagcagaagaatcagtgaacttataaacaggctatttgaaaatacacagaggagacaaaaggaagaaagaataaaaaagaatgaagcatgactacaagatctagaaaatagtcttaacagggcaaatctaggagttattggccttaaaattattggccttattggcctgatgaggtagagagagagagacggnggtagaaagtttattcagaggaatagtaacaaag

SEQ ID NO: 19834 - DNA, 383 bp, Glycine max
agcttttgggtctcgctgagtttttggctattcacttttctttcttgtgatgcccctgtgcaggtaagaaatgtgtatacctcttctactgtgaatctgcctgttgtcagtttatttcatagacttagttattgagccctcagaggatagagggaaagtcttccctctcatatagaagggaaaaggtagctccgagagtgggagaatatatttataatacatttctctaagagtacttatatccataatttataaacaaattttgaaaattaaaagagagcagtagaataagcaaaacagttgaacaattatatgtttgcatacctatgaaatgcaaatatataaagaaatatatatatctgcaatttatatgaacagaatca

SEQ ID NO: 19835 - DNA, 386 bp, Glycine max; identical to SEQ ID NO: 19829

SEQ ID NO: 19836 - DNA, 365 bp, Glycine max; identical to SEQ ID NO: 19831

SEQ ID NO: 19837 - DNA, 404 bp, Glycine max
  unsure at all n locations
agcgttcatcacccttgcatcgactgcattgtgtggcattatccattcagacttacaatggctgcccctcctcatactacgcggaggtgagccaacagctctgatgtatacattcctttatgactatgcaaaaggtagaaaggatttggggcacaaatattcttgccttggactggatnggatctctttatttccttgagtggctcgatatttattagaaggagattgctatctaatcggaccaattttctataccttttgatttttagggcgtgtgattggatagacgggctgctcttcttgctggctattcttggcgcatgctccataatgcaacgattcacacgccttccaagcgaactatatggcctgctaataccaatgctctctatgcagtaggctat

SEQ ID NO: 19838 - DNA, 400 bp, Glycine max; identical to SEQ ID NO: 19832
  unsure at all n locations

SEQ ID NO: 19839 - DNA, 392 bp, Glycine max; identical to SEQ ID NO: 19833
  unsure at all n locations

SEQ ID NO: 19840 - DNA, 447 bp, Glycine max
agctcttcctctggttgctctgctaaggtttccatgtgctagaaagaaagagaagagattgaattctccattccagtgtctgcatgtgatgagtatttatccctccctagatattaagttaacaatcccaatggagaagatgtgcgtaaatgaatcaaaaacttggtatccaaatttcacgaagatccaatggttaaaaagtctcagattgtagttttactaaaacagatttgggtatatgcggaaaaaaggaaagctacgacacggagggaatttctctcagctccgacattgtttctcatattgcaacgatgggaatctttggaaatgagttccagacttggtgctcacatttcacgacgatctaacggttaacgagtttatgatcgtcattttctgagacagagttcagtgtatgcgcgaaaaagatagggtcttgggagagga

SEQ ID NO: 19841 - DNA, 383 bp, Glycine max; identical to SEQ ID NO: 19834

SEQ ID NO: 19842 - DNA, 384 bp, Glycine max
tctgactcatgacctcagctatcttaagaaggggtgaattaatttcccactaaccaccttttgacccccttctaaatgatacgctccaaatgtagaagtataagcaacaatcaattcaataatgttctttatacatgcgagacaaaatcgactgccataatataaatgagattagggaagagagaaatgctaactcactttatactatttaggacacttcccgtgcctacgtgcaattcctcagcaacccacttgaaattttccactctctttgcaagaatacttttacacagtctgaaccacatagggacaacccatccattgtgtccaggaatacttaccacttaagagaccctccatcccttaatcaatctctttgaataa

SEQ ID NO: 19843 - DNA, 386 bp, Glycine max; identical to SEQ ID NO: 19829

SEQ ID NO: 19844 - DNA, 294 bp, Glycine max
agcttgaatttgaacaacagaagctcttgagatattctaatggtcataacttatcacacggaagtccgattcatgcgcataatatatcgagaccctcgaaattgcactacggaagctctcacgaaacataaatggcgataacttttcacacggatgtgcattcaagtgcataatatatagagaagcttgacagtgaacaatggaagctctctagaaatatcaatggacataacttatcagacggaagacgcattctggcgcacattatatcgagacgctagcaattgcacaaag

SEQ ID NO: 19845 - DNA, 365 bp, Glycine max; identical to SEQ ID NO: 19831

SEQ ID NO: 19846 - DNA, 376 bp, Glycine max
atcttaagtcactgggctgcagcttaaccaggggagatggaccatttcaagttcttgactgaatcaatgaccatgcttacacagttgagctgcccggagagtataatgtcatctccaccttcgatgtctctgatctatctctattctatgcaaatggacaatcctatttgaagatcaactcttctaaagagggagagaatgatgatgacatgaccaatagcaatggacaagatccacttgaaagacttggaggacctattgatgaggacatgaccaagatctatggcaatgatccacttgtacgacttggacgacctattacatcgtctatagcaaggaaagccaatgaagctcttcaacacatgcatgacatact

SEQ ID NO: 19847 - DNA, 449 bp, Glycine max
gctgtaagacattatgcaacattgttttggatattcaacatgaacatcccatttcttgacgttggtaccttcgcgattagattgcttctcctatctctgatggaaagactggaatctttcattgaatatcatagcctttattgagtaattgacccaaactcataatattattcttcatatttgggacatagtagacatttgatatgaattcatgtcttccatctttcaaataaattaagatcttacattatccttttacaagaatcttagaattatcaccaaatgagacattgtcacttactgattcatcaagatccacgaacatgcttcttttctacacatatggttgcttgcaccagtgtcaacgtatcatgtgttgtcttggctaccttcattacatgcacatgctagaagcactatttcaaacttcttggctttttgctccacat

SEQ ID NO: 19848 - DNA, 400 bp, Glycine max; identical to SEQ ID NO: 19832
  unsure at all n locations

SEQ ID NO: 19849 - DNA, 392 bp, Glycine max; identical to SEQ ID NO: 19833
  unsure at all n locations

SEQ ID NO: 19850 - DNA, 399 bp, Glycine max
agctattgataatatcttacgtgtcataagagagtcaaaagtcctaattacaattcctatcacatacctgtccaaagcaccacaatgttgtctttggttaaactcttgaaatttgaaaataaatattttataacaaatgctaacttgtgctctaagaacattagttgaggaatttaaagtagaaattatttttactagaaaacgaaaaattatgttcccattatcttattacgcttttatgatttaggcaataaatatttttctcttttaattctttaatcaatgtcttaagtacattacttatcaatacctatattctatttatgctctagacagtattcattgtattcgacaaatactttttttaattttaaataaaatgtgtggggatgttagttt

SEQ ID NO: 19851 - DNA, 450 bp, Glycine max
agcttcaaccaattaacattgtttgaatgacaactgttgtagttggacaacaatcacatagtttgtccaccatggtatgctttatgttcctattggttatagctctggtatgctttatgttcctattggttatagctttggtgctagaatgttcaatttggagtccacaagaggaggatctccatatggtgctggagtttttgctggagatggtacaagacaagcaagtgaaatggagctggagcttgtagagtatcatggcaagtatatatgaaattagcccataaaagctagattgaattctgcgattataaattcattaagccctcctagccaggtcagcattctagtctgtcccaagttggtgacctctaaatcaaacttcttaatgcactcaaacaaaccattggtgacctcacaatcaaacttcaagtcagtgttgtcataaaa

SEQ ID NO: 19852 - DNA, 386 bp, Glycine max; identical to SEQ ID NO: 19829

SEQ ID NO: 19853 - DNA, 365 bp, Glycine max; identical to SEQ ID NO: 19831

SEQ ID NO: 19854 - DNA, 400 bp, Glycine max; identical to SEQ ID NO: 19832
  unsure at all n locations

SEQ ID NO: 19855 - DNA, 392 bp, Glycine max; identical to SEQ ID NO: 19833
  unsure at all n locations

SEQ ID NO: 19856 - DNA, 438 bp, Glycine max
agcttgttaccttattgacatttaaattaatactagctagtaaagggtgaaattaatcatttcttcacaagagtgtgcaaagatgttcgaatcacctgtggtggaccaccgacatcatttgtgcaatagagcctggcatcatcaacaagtttgcaaaatcttggaaatgcattagcaaatcttttgtgagatttcaactgtgaattcacccttactgccctacctgtcataatagctctcctcgtaaaattccaatggcaagatgttaacctgtcatatatatatatataaaaccaattcccaaactagcaacacggatgattccacaaagcatttatacctaatgcctctaacaacagcaagatagccatcacaaaccacaccaactagctcaattctgtaggctttcgcgtgcgcgatctcattacaattttctct

SEQ ID NO: 19857 - DNA, 464 bp, Glycine max
agcttcccaagtatttaagttcttcctcaaaactatcctaagcaaagttcccaatgtcctattaacaacttccatttgcccatcggtttgtgggtgacaagtagttgaaaataacaatctactgcccaacttgccccacaaagtcctccaaaaatggcttaggaacttagagtccctatcactaacaatgctccttggcaaaccatggagtctcacaatctccttgaaaaacaaatcagccacatgggaagcatcatcaacttttttacatggaataaaatgagccattttagataacctatcaacaaccacaaaaatggaatctctaccactgcttgtttttggcagccccaaaacaaaatacatggataaatcaatccaaggatactccggaattggcaatggagtatacaatgcatgacgctgtaccttagactctgcccttttacatacaatgcaatgtt

SEQ ID NO: 19858 - DNA, 383 bp, Glycine max; identical to SEQ ID NO: 19834

SEQ ID NO: 19859 - DNA, 386 bp, Glycine max; identical to SEQ ID NO: 19829

SEQ ID NO: 19860 - DNA, 274 bp, Glycine max
agctcataatatatcgatacgctcgaaattaaacatcgaatactctctggaaattcaaatggtcataactttctacacggatgtccgactgcagctaatcacatatcgattcgctcacaactgaacaacggaagctcttgagaaattcaaacggtcctatctttacgcacggatgttagattaaggcgcatcatatataacgacgctcgaatttgaacaacggtagctctcgagaaactcagattgacatcacttttcacactgatgtccaatt

SEQ ID NO: 19861 - DNA, 365 bp, Glycine max; identical to SEQ ID NO: 19831

SEQ ID NO: 19862 - DNA, 400 bp, Glycine max; identical to SEQ ID NO: 19832
  unsure at all n locations

SEQ ID NO: 19863 - DNA, 392 bp, Glycine max; identical to SEQ ID NO: 19833
  unsure at all n locations

SEQ ID NO: 19864 - DNA, 383 bp, Glycine max; identical to SEQ ID NO: 19834

SEQ ID NO: 19865 - DNA, 386 bp, Glycine max; identical to SEQ ID NO: 19829

SEQ ID NO: 19866 - DNA, 314 bp, Glycine max
agcttcgatttgctgcgatccgcgaggaacatgcatcaaccgcaccgatcagtggcaaaacagcacaatcgtgaagcataagaggagacaacagagagaaggacagagagtcaccgacctaggattgcatcttcgtcctcctcgccggtggtgacagcaacctcctcgagcttgacgatgggagcgacgtgtgctccggtgttctctgcgacgacgacggcgggtgcctccttctcttatcggagctcgggatcggcgctcgacatcttgtggaaggagagatggacacagagagatagagagagagatcccgt

SEQ ID NO: 19867 - DNA, 365 bp, Glycine max; identical to SEQ ID NO: 19831

SEQ ID NO: 19868 - DNA, 400 bp, Glycine max; identical to SEQ ID NO: 19832
  unsure at all n locations

SEQ ID NO: 19869 - DNA, 392 bp, Glycine max; identical to SEQ ID NO: 19833
  unsure at all n locations

SEQ ID NO: 19870 - DNA, 383 bp, Glycine max; identical to SEQ ID NO: 19834

SEQ ID NO: 19871 - DNA, 360 bp, Glycine max
  unsure at all n locations
tgcttgacattatagcagnaacctggaattttgtgggttatagctcaacttcaaaggcctacagaatctacctaccacagagcaacanagtaatcgtcagcagggatgtcaaatttctggagtcagatagttgggactggaaaaatgataagaggtctgagtttcaggaggagaatgaagatgttgatgaagaacccatcagaggaaccagatcactttcagacatctaccanaggtgtaatgttgctgtaatggagcctganggatatgaagaagctacagctgatcagaaatggagaaatgcaatgaaagaggagcttataatgatngaaaaaaataaaacatgggagctggtggaca

SEQ ID NO: 19872 - DNA, 332 bp, Glycine max
  unsure at all n locations
agcttgtcatgttctgtgcaggtgttgctactggtggaggcacttgaatttggttgccagacctcaaggtgatggcactcacattttttgggttctgcacagtttgtgaaagcaatttgtcataattttgggactgagcttggttcaactgagtagccatctgccccatcttatttgttagactctgaatggaggctcttgtctcttgctgaaattgcatattctggatggtcatttgcctcactaactcttctaaagaaggttgaggaggagccttagttgcttgttgtctntgttatgactgctgctgttgtattggaggaggaacatat

SEQ ID NO: 19873 - DNA, 322 bp, Glycine max
agcttctgttttcaatttcaagcgtctcgatattttacggggctctatccgacatccgagttaaaagtaatggtcgttggataattctaagagcttcccttttcaattacgaaaatctcgatatattacgggacacaatcggacacccgagtaaaaagtaattggcgtttgaatttctcagagcttctattttcaattacgagcgtctcgatatattacgggactcaatcggacattcgagtaaaaagttattgtcgtttgaaatttctcaaagcttctgttttcaattacgagccgtctgatatattacgggactcaatcg

SEQ ID NO: 19874 - DNA, 383 bp, Glycine max
agctttattatttattctttcttcctattaatatatcttgtgttggtaaatccacacatttaattaagttactaagttagtcaattaattaagctcagcttaacatctagcagtatatataaacatgcacggaaaggaaggatagtttaaatatatatatatattcttgtggtatttcagtaacctacataaattatcgactctgttgtgtaattaataaactctacgtcaccagtatgtagaatatatataaaagatataaacaatgagcaaacagcaccagtggtctagtggtagaatagtaccctgccacggtacagacccgggttcgattcccggctggtgcatattgtttctaactttttatctatgcagtctcatca

SEQ ID NO: 19875 - DNA, 209 bp, Glycine max
tatagaaactcagctcatgctacaaacatttataatagatctcctcaacagccaaaccctttttcttcataattattatgaaccttccaaccattggatccattccaggttggaggaatcatccaaatctgagatggacgagtccctcacaacaacaacagcctgtccttcctttctagaatgctgctggtccaagcaagccatatgtt

SEQ ID NO: 19876 - DNA, 301 bp, Glycine max
  unsure at all n locations
catcagaccacttccagggtgctggaactacttcacttggttttatggggcctatgcaagttgaaagccttggaggaaagaggtatgcctatgttgttgtggatgatttctccagatttacctgngtcaactntatcagagagaaatcagacacctttgaagtattcaaagagttgagtctaagacttcaaagagaaaaagactgtgttatcaagagaatcangagtgaccatggcagagagtttgaaacagcaagtttactgaattctgcacatctgaaggcatcactcatgagttctct

SEQ ID NO: 19877 - DNA, 309 bp, Glycine max
agcttcattctttatgagacgaaccattccaagtgttggagaagatcaacgacaatgcctacaagattgacttgcctagtgagtataatgtaagtgccactttcaatgtgtctgatctatctctctttgatgcagatggaggagccttggatttgaggacaaatccttttcaacgagggagtgatgatgacataaccaatggcaaggaccatgaagcacttgaaggtcccatgaccagaggcagacttaaacaagcccaacacatcatagagacaaagctggtcatttgtatagctgtcattgatgatg

SEQ ID NO: 19878 - DNA, 264 bp, Glycine max
  unsure at all n locations
tcggttaaaacatccaaaggaggcttccattgggaaatgacaatgccacacgaggattgcgcaacttcactccctaagaagtatttgagtggacccatgtcttttgtctganactgactatggagacgagatctaagtcagagaataccctcagaatcattgtcaataatgacaatgtcataaacatagacaacaagctacatgcaacgactagatggagaatggatgaaaaacaccgagtgattagtctcacaatgggtcatg

SEQ ID NO: 19879 - DNA, 350 bp, Glycine max
  unsure at all n locations
cgaatcggacatccgtgtgagaagttatgaccatttggatttctttatatctttcggtggncaaatnccaaccctggtgagttttattccacccgattcggacatctgtgtgaaaagtcatgatcatttgaatntctcgagagtttccgatgtttaatttcgagcgtatcgatatattataaccctgaaatcgacctcagtctgaaagttatgaccatttgaatttgacgagagctttcgttgttcaatttccaatatcactgtatgtgatgcgcctcaatggacattcgagttanatgttatgaccatttgaatttctcaagagcttccgttgttcaattctgagcgtc

SEQ ID NO: 19880 - DNA, 346 bp, Glycine max
  unsure at all n locations
agctngcttcttttggtgcatagaatgcaggcaaaaaaaaaatagtaagtgtcatgaatctctgacataagcttcaaccaattaacattgtttgtatgacaactgttgtagttggacagcaatcacacagtttgtccaccatggtatgctntatgttcctattggttatagttttagtatgctttatgttcctattggttatagctttggtgctggaatgttcaatttggagtccacaaaaggaggaactccatatggtgttggagttcttgctggagatggtacaagacaagcaagtgaaatggagctggagcttgcagagtatcatggcaagtatatatgaaat

SEQ ID NO: 19881 - DNA, 411 bp, Glycine max
  unsure at all n locations
agcttgcttcctttcccactggaatnncctctatcaaagccactctgattactttttcctcctctgggagcataattctaagggaagccattcttcctaaaacatctatcaactgtatgattgtctttgccacagtaagtacatgaaaatcctgaattcgatgaggttgtgcttgctgcattgatcaagctactgtttcctatcatatcattgctattaatctatctttcttgttgaattgcataagaaaagactctagttatgccaggtaaaggatccatcatcaatacattggatctgacagtgttgtactgatcatttaatcccctaaggaattgcataactcgatcttgcttctttctttccataacactaacaagagcatcacatgtacattttagattgcatgta

SEQ ID NO: 19882 - DNA, 353 bp, Glycine max
agcttgtttatattactagaagactatgagatgtttcctaatagtgcaatagatgatgatggtaaattggttcatctagcactaatgggagaagcagaacctgtcactttcccagaagcaattaaaaaggaagtatggttagaagctatgagagaagagttgaaagccatatagaggaacaagacatggaagttggctagtctaccaaatggaaaaacagctataaatgtcacatgggttttcaagaacaagctcacaccagataggagtattgctaaacacaaagccagactagtggcgaagggctgtatgcagaaagaaagctatgattacaaagaagtctttgcactggt

SEQ ID NO: 19883 - DNA, 336 bp, Glycine max
  unsure at all n locations
ataagtatattcactaggagaacatcgtagtggaaggaaattgtactgatgtgattcaaaagatccttccacccaagcataaagaccctggaagtgtaactattccttgtttaattggagaagtcaccgtgggaaaggctcttattaacttaggagccaaaattaatttaatgccactctccatgtgcagaaaggtgggagagttggagatcatgcccactangatgactntacaacttgctaaccactccattaccagaccatatggagtaattgaagatgtgttggtcagagtgaaacattttatcttcctggcagactttgtggtaatggata

SEQ ID NO: 19884 - DNA, 410 bp, Glycine max
  unsure at all n locations
agctttttagattgacacatatcttnaaactattgggaaaagacacaatgggcctatatatatgtttgctgacttcaaaaagcaacagagagatttcaaaagacaacttaattgtcaaatgctctctaaaaaactataggtcaaacactttcaaatcaattgagtattcttgtaagatcttcaatttgtattatcatctctaaaagagagaaattcttctgtacattctaaatactgtgttgtgatcaagagattgtttatctctagacttgtgagaatcctgaacacaatggagacgaatctcaaggtgtgttcagaagttgcaaagagtgtacaaagatagcggaaaatctcaagtgcgttgcttgatgacaggacatagacacgagaagtggtcgatcaagataaaa

SEQ ID NO: 19885 - DNA, 446 bp, Glycine max
  unsure at all n locations
taagaggtgcaaattaaataccatttgatactgagacaatgtgacaaganatgtaataaataagacccaagtgtatacgataaaattgtgacagactccacatactacacatgtaaaacattaacaagccatcctgattcctaaacacatgatatgcatcttcattttcaaagccacggactgaggtccatcatctacaccaagcttctcaaggtcctcataaaaagcatcgggatttttcttccacaactcttccaccttatttatttgctgttcacttatttggcgagcccttaactgcttcttaaggtataagacttgtatattctctatgtgataacctaaaaggcactttcttgaagcatcatatgatatgccaaaatcatcacattctaataagcattantgtaagttaaatactatttcttgaagtttcaattactttt

SEQ ID NO: 19886 - DNA, 340 bp, Glycine max
  unsure at all n locations
agctttgaatttctttgttccggaaacctttcttttctcatgtgcacccaaacccaatctccgggttcgaacacaaccttctttctccctttgatggcttgtttagcatagcttttacttttcctctcaatttgatctttgactctataatgaagcttcttcacatagtccgcctttgcttgaccttctttatgcttaanaacagaaacattatgcatatgcaaaagatcaagaggagttagtggattaaaaccataaacaacttcaaggtttaagaaagaagaatcatcggatgacgccgatcgaacatttcctaatagacatcatccaaatattattc

SEQ ID NO: 19887 - DNA, 310 bp, Glycine max
  unsure at all n locations
actcggatgattgattgagtcccgtaatataacgagacgctcgaaatngaatgtngaagctctgagccaattcaaacgacaataactttttactcggatgtctgattgagttccgtcatatatcgagacgctcgaaattgaatggtgaacctctgagccaattcanacgacnataactntttactcggatgtctgagtgagtcccataatatatcgagacgctcgaaattgaatgttgaacctttgagccaattcaaacgacaataactttttactcggatgtcctattcagtgacgtaatatatcggga

SEQ ID NO: 19888 - DNA, 362 bp, Glycine max
  unsure at all n locations
agcttttatcattctactttnttttacttcttacaaataaaaaaatatctttcttattttgaagttcgaaaagttagtataaattattaccgttaaaagtaatcaaattaaatatatattaatacagtttatccaaaatttaataagatgtttacaattattttcatcanaccattgtctcatatattctatttttataatatagtgagtataattttatttgcaaaanaattaaattcaagtattttaaagaatttaaaaataaatatatatatatatatatatatatattantttaattacatatatgtatagatatnaaatattttaataaagtgcataaattataatatacatatatt

SEQ ID NO: 19889 - DNA, 463 bp, Glycine max
  unsure at all n locations
gcttgtgtcacgattcactgtgacagtcaaagcgccattttcttagtttatcaccaaatgtaccatgagaggacagagcacatagatgcgaaactacacttcatcagagatgtgattgaatctgagaaggtgaaggtcgataaggtttcaacagaagataacccggctgatatgtttacaaaatccctctctagtgtcaagttcaagcactgcttggacttgataaattttgaggatgcctaaagcacattggtagaagtgcatccctgaatcgcaagataagcacttgttgatttggagtcaaagtggagatttgtggtgtgtgactcanaatcacaaatggcacaagtgggaagactttaagaagtgctatcataactaaattcagttatgataactgaatctgttttggcaccanaacatagctagaatgagtgtgtgtgatatatatatatatatatat

SEQ ID NO: 19890 - DNA, 474 bp, Glycine max
  unsure at all n locations
actatannaaactcacgctctgagacaattcanacgacaacaactntntactcggatatttgattgattcccgttatataacgagacgctcgagagtgaatgtttaagctntgatccaattcanatgacaataaattttttctcagatgtctgattgagtccaataatataacgagacgctcgaaattgaatgttgaagctctaagccaattcaaacgacaataactttntactaggatgtctgattgcgtcccgtaacatatcgagacgctcgaaattgaatggtgaagctctgagacaattgaaacgacaacaactttttactcggatctctgattgaagtccgtaacatatcaagatgctcgaaatngaatgtggaatctctgagccaattcacacgacaaatacgttttactcggatgtctgattgagtcgcgtacatatcgagacgctcgaaattgaaggtagagctct

SEQ ID NO: 19891 - DNA, 324 bp, Glycine max
  unsure at all n locations
tgtaatcgattacacacatactgtaatcgattaccagaagatatttttcttataatattctcaacagtcacatctttgtacttgattcttgaatggctgtcaaaggcctatatatgtgtgacttgngacacaaatttgctaagagattttcagaacaaaaaggtcttatcctcttaaaaagcaaaatcngtttatcctcttacaaattccttggctaaaacacttgtgattcaataaggaattanttgagtgctcacattgttcaatctatctctttcaagagagatnncttcttttcttcttcttcattctgaaaagggatta

SEQ ID NO: 19892 - DNA, 279 bp, Glycine max
  unsure at all n locations
gcttatgagagagtcaagatcaattgagaggaaaattattctatgctaaacaagccaacaaagggagagagaaggttgtcttcgaacccggagattgngtttgggtgcacatgagaaaagaaaggtntccggaacanaggaaatcaaagcttcaaccaaggggagatggaccatttcaagtgcttgaaagaatcaatgacaatgcttacaaagttgagctgccccgtgagtataatgttagttccaccttcaatgtctctgatatatctctttttgatg

SEQ ID NO: 19893 - DNA, 407 bp, Glycine max
  unsure at all n locations
acgacaataactgtctactcggatgtgtaattgagtcccgtaatatatcgagacgctcganattgaatgttgaacctatgagccaatncaaacgacaataactttttactcggatgtctgattgagtcccataatatatcgagacgctcgaaattgaatgttgaacctctgatccaattccaacgacaatcactttttactccgatgtccgattcagtggtgtaatatatcgggacgctcgacattgaatgttgaacttctgagccaattcaaacgacaataactttttactctgatgtatgatcgaatcccgaaatatatcgagacgctcgaaattgaatgttgaacctctgatccatttcaacgacaataacttttactcgatgtccgattatagacgaattatc

SEQ ID NO: 19894 - DNA, 362 bp, Glycine max
  unsure at all n locations
agctttgtttgtatntaaacgacaataactttntactcggatgtctgattgagtcccgtaatatatcgagaccgtcgaaattgaatgttgaagctctgagccaattcaaacgacaataacgttttactcggatgtctgattgagtcccgtcatataccgagaagctcgaaattgaatgttgaagctccgagccaatctaaacgacaataactttttactcggatgtctgattgagtcccgtaatatatcgagaccctcgaaattgaatgttgaagctctgagccaattcaaacgataataaacttttactcggatgtctgatagagtcccgtcatatatcgagacgctcgaaatcgaatgtt

SEQ ID NO: 19895 - DNA, 370 bp, Glycine max
  unsure at all n locations
agcttgtgttgttcttacgaatgatgacatggtcaattgaactctcagaatatgatattgcctacaagctgagaggtactatccgagcccaagtactagccaacttcattaatgaattccatcccccaccaccatatttcaagtaggaatggtggacgatgcatgtgtaaaactcttccaataggcacgggagtggtgttggggttattctcgaaggaccatggtacaatccttacattntggattcaaagccacatgcaattaggccgaatacgaagaactctttgcaggtttaaggctttccaaacaggttgatgctcaaagggtccggtgtcgaagcgactccaagatcgccgttgagtatatcaac

SEQ ID NO: 19896 - DNA, 412 bp, Glycine max
  unsure at all n locations
agcttctgttgtgnacatnttgacttgctntccaatctgacagtcaccacagattctgccttcttctattttcagattgcggatgcctttaacagcacctttgtcaatgattttcttcatgcctcttaagtgcagatgtccaaatctttgatgccatattctgacttcatcttctttggaggatagacatgtggaggagtagctggtttcttggggtgtccataagtaacaattgtcctttgatctgctgcccttcattagaacttcactcttctcatttgtcaccaagcattctgactttgtgaagtttacattgaacccttcatcacacagctgactgatgctgatccaagttgcagtcagtcccttcaccagcagtactttgttcagactangaagtccatcatgaact

SEQ ID NO: 19897 - DNA, 383 bp, Glycine max
  unsure at all n locations
agctttattcttttacaaaaatgaagctaaactntaaacaagaatgaagcttcgataccacttgttagacaagtggcctcagatatcttaagaaggggggttgaattaagatattacaaactattttcccaattaaaattctactttgattntaatgcaagttcaaagttcccttaaagattaatttctaaatgatgattcaaaataaccaaactgaatgtaaaagtaaagcaacaataaataaaagagtttaagggaagagagagtgcaaactcagttttatactggttcggccacacccttgtgcctacgtccagtccccaagcaacccacttgagagttccactaacttgcanaaaccctttacaagttctgaaccacac

SEQ ID NO: 19898 - DNA, 439 bp, Glycine max
agcttctaatctttgtacaagaatgaagctctgataccacttgttagacaagtggcctcagatatcttaagaagggggggttgaattaagatattccaaacttttctcctaattaaaaatctatcttactttctacttaagttatgaattcccttaatgacaatcttcttaaatattaattcacatgaagcaacttgaattatgaatataaagcaataataaataaaggagattaagggaagagaaaatgcaaactcacttttatactggttctgccacacccttgtgcctacgtccagtccccaagcaacccgcttgagagttccactaacttgtaaattccttttacaagttctaaacacacaacgacgaacccttctttgtgtttagagattctgtacaacaagagactcacagtctcttaatcccttatagaatg

SEQ ID NO: 19899 - DNA, 422 bp, Glycine max
  unsure at all n locations
agctntatttgttattttctcctgccaccattcaaaaattgtaaatgtatccttttccacggagcacaatagaatgatgattttgctgaattaaagtgtgtgacaaacattttacaatgaaattaagactttattgtaaaatatataattaaatcaatttcgttgttttgtttttttcatcttcactaatatgctggaattgtgattatatattacatcttcggttgtgaaanaagtaaagaatagaattactattacattatataaggcgactaaatataacatgtacaatagaaatacaatttttgttgtacaatgtacaacagaattatatttttattgtgcatcgtttattagcaaagaaatatataaatctttcactaaataaaattgagattatctgttatacaatagaatcttga

SEQ ID NO: 19900 - DNA, 450 bp, Glycine max
  unsure at all n locations
agcttcttggttaatatttcttaccacttcaacatgtcattcgaagtcaaaacctaagggtggtacttgggaagattangggtggcaatgtaagccttggccggacgagttgggctagatgactcaacccgctagcccatattgactcaccccgcctaacccaccaacctagcgggacaggttggctagccagccatccatacatacatatacatatatatacaaataggtgttttgtcttacttgtcactttgtatcttttaagtttatagtgctattcaaaaatcacaatatatatgtgctatcatctttatattattttataaatttaattcctttaatacaaatagacaaatttatattaaaattaaatctaggataaacaattaatatattntatgttctctagataaatctgttcatttgggataactttatagaataagatga

SEQ ID NO: 19901 - DNA, 365 bp, Glycine max
agtctttcgttgttcaatttcgagcgtctcgatatattatgcgcctgaatcggacatccgagtgaatagtcaagaccatttgaatttctggagaacttgcatcgttgaatttcgagcgtgtcgataaattatgcgcctgaatcggacctccatgttaacagttattgaccattggaatttctcgagagcttccgttgtgcaatgtcgagcgtctcgatgtattgtgcgcctgaatcggacctccgagtgaaaagttatgaccatttgagatcctcaagaagttacgttgttgaatatcgagcgtctcgatatattgtgcgcctgaatcggacctccgagtgaatagttatgaccattagaatttc

SEQ ID NO: 19902 - DNA, 263 bp, Glycine max
catatatacctcctcctctacataaccattaaaaagaactgtttcacattcatttgttgcaactcaaggtcaaaataagcaactaatgccaagatatacaaagagaatctttcatagatacaggagaaaaagtctttgtgtagtcgattccttctttgtgagtaaatccctatgcaacgagtcttgcctggtatctctcaatgttggctaatgaatcccttttggtcttaaaaacccatttacagccaagggcctttgcccta

SEQ ID NO: 19903 - DNA, 402 bp, Glycine max
  unsure at all n locations
agcttcaacaatggttagatggaccatntcaagtgcttgaaagaatcaatgacaatgcttacaaagttgagctgcccggtgagtataatgttagttccaccttcaatgtctttgatttacctctttntgatgcagatgtagaatccgatttgaggacaaatccttctcaagagggagagaatgatgaggacatgaccaagagcaagggcaaggatccacttgaaggacttggaggacctatgacaagggctagagcaaggaaagccaaggaagctcttcaacaagtgctgtccatactattngaatacaagcccaagtttcaaggagaatagtccaaggttgtgagttgtatcatggcccanatggaggatgactatatgacaccactcttgtctcaatttt

SEQ ID NO: 19904 - DNA, 348 bp, Glycine max
  unsure at all n locations
agcttgaagtgngtatcccacaatcttttcatagtagaataccggtaatgtgtctactatcattgtcatcattttttttcggtcattgaggtgccacttgagctgccaggtctctccacctttgggtgtattctttgaaagatctgtgcccctttttgcacatgttctgttgttgcatcctatccagaaccatatcaaaattgtactgatactgcctaacgaaggcaaccattaggtccttccaagaatggactcgggaaggttccaagttagtgtaccaggtaacagctaccccagtaagactttctttggaaggaatgtatcaacaatttctcatcttttgcgtat

SEQ ID NO: 19905 - DNA, 413 bp, Glycine max
  unsure at all n locations
tgtttgtattgttatcactatcaaattctccaatatagattgtgaacctatctttgtttttccaatatgaaaaatcatcaacccagaatgagtcaacattattntgttctctaatgccaggtctcataagataacaatacaaacaacatgtagcatcttttgatatattatattccaaccaattgctaaatttcaaaaaccaatcacgattaaactttcaaattagagtcttaaattgttgtattggaaaatcatgctctcttggctgacaaggttctttttgctaataaactcttcggatgttatcccaattattaggatgataacatgatattntgttcctctctcctagaatagcatgagaatattccagatcaacttctaagactctttgtttcacatatgactataat

SEQ ID NO: 19906 - DNA, 340 bp, Glycine max
  unsure at all n locations
agcttctgnttttcaantttgagcgtgtagatgacttatgtgcgcatatcgaacattcgtgggaaaacttatgaccattcgaatatctcgagagctaccgttgttcaatttcgagcgtctcgatatattatgacccccaatcggacatctatgtgaaaacgtatgaccattcgaatatctcgagagcgttcgctgttcaatttcgagcgtctagatgagttatgtcctcgaatcgaacattcgagtgaaaacttatgaccattcgattttctcgagagcttccgttgttcaatttcaagcgtctcgatatattattgttcccgaatcggacactctcgaa

SEQ ID NO: 19907 - DNA, 406 bp, Glycine max
  unsure at all n locations
agcttcagctgttctatttcgagcctctagatatattatgtccatgaatcagacatctgtgtgaaaagttatgaccattcgaatttctcgagagcttccgttgttcaatttcgagcatctcgatatattatgtcccagaatcggacatccgagtgaaatatatgaccattcgaatntctcgagagcttccgttgttcaatttcgagcatctcgatatattatgtcccagaatcggacattcgagtgaaatttatgaccattcgaatttctcgagagcttccattgttcaatttcgagcgtctagatgagttatgtctccgaattggatatctgcgtgaaaagttatgaccattcgaatttctcgagcgctctctttgntcaatatcgagtgtctcgatatattatg

SEQ ID NO: 19908 - DNA, 290 bp, Glycine max
  unsure at all n locations
tctgtctcaacggtatctacaccagctnggatagtatgatataatatcttcacagaggcgtcaaccgcttccaactcattcaatacaggaaatttaccaccagaacatctaactctaattatctcatatacaagatgctgcgaccttctaaaatctggagcccatgaatgtatgtcggccacattcaagtctgataacttctttgacgagccagagaatgctgctgtaaacaccctgcaaataaatacagtctacaccttaactccatacatagcttgcatcaaaacctt

SEQ ID NO: 19909 - DNA, 400 bp, Glycine max
ggcagcaagctttttatcttggccatgctggattgttaggagagatttcttggcatttgtgctcataaacgcaatatccaccactccttcattggtctgccaggtattgtgattacagcaggggagaataatcacattctcctctgacgacactttctgatactcatcactctttctgtttgttatgtcagagggaatgtcgacgatgaattccctgactagactttcatatcaatctcccaacttggtgacagtattcaacagtccagcaaccttgatgaggacatgatctccttgcgatccacagcatctcttaccagagctctgtgtaatgcaagtctcgcgtgatatacaaaattacacctttcaacatctgcaatggagtggaatgaaatgttgt

SEQ ID NO: 19910 - DNA, 445 bp, Glycine max
  unsure at all n locations
agcttccaagatttattatcaagattcattcaagaatccagagaagacctaattcagaattagttttaaaaagtttttttcaaaacctgagtaccacatgaaattttctcaaaaccctttaccaaagagtttttactctctggtaatcgattaccagattattgtaatcgattaccagtagcaaaataattntcaaaaagctttcaactgaatntacaatgttccaattgatttcaaaatgttctaatcgattacaatgttttggtaatcgattaccagtgtgtttgaacgttgaaattcaaattcaaatgtgaagagtcacatcctctcacaaaaaagctntgtgtaatcgattacactaatttggtaatcgataccagtgatagtttctgaacaaatcanaaaatgtaactcttcannatagttttaactttttttaaaatgg

SEQ ID NO: 19911 - DNA, 375 bp, Glycine max
  unsure at all n locations
agctntacatctaattcaatggccgcctgaatcccgagggtgcatgcttcgtactcggccatattgttggtacaatcaaaacctatcctagccgtgaaaggaatacaatgatcatccggtgatacaaggactgcccctactccgtggcccaaagcattaaacgccccatcgaagcacacaatccatttgtgtatgtcctcgtgcgtctgcttgtcttcaaacagggccatgatatcttcatatgggaactcggggtgcatcggccgataatccgggaggagttgctgggccaaataatccgctaatgcacttgcctttaccggcttttgggtgacgtacacgatatcgaattcagataatagtacctgccaccta

SEQ ID NO: 19912 - DNA, 369 bp, Glycine max
  unsure at all n locations
agcttctttgattgtctaagtgtggaccctctanggcaaggcggcattctccactattttcggagccccatgaatgtcattgcctagcgctgttcatgtgtcttccaccttcgagtctggagccccgcgaatgtgattgcctatctctatacgccaattctccattctccacttttattcggagccccatgaatgtcatcgccaagcgctgttcattcatcctccacccaaagagtatggagctaagcttcttgattgcctaagtgtggaccctctatggcaatcctccattctccactttgttcggagccccatgaatgtcattgcctatcactgttcatgtgtcctccaccttcgagtctggagccc

SEQ ID NO: 19913 - DNA, 386 bp, Glycine max
agcttcttattttcatatgatgcagatgggtttgtagctacctcatgcactcctctaatgactatggcatcatttctggcgctaaactgctgggagtcggaggccatcttctcaattaaatttctggcttcagcaagagtcatgtctccaagggctccaccactggcagcatctatcatacttctctccatattactgagtccttcataaaaatgttggacaagaagctgttctgaaatctgatggtgatggcaactggcacatagcttcttaaatcgatcccagtactcatacaggctctctccactgagttgtctaatacctgacatatcactcctgatggctgaggccctggaagcaaggaacaaatgttctaagaatactct

SEQ ID NO: 19914 - DNA, 441 bp, Glycine max
agcttgagttgtcttatgctctttttaaggctctgctcgacttacataaaagtctgacttacgagcctatttaaaagcttgcttaaagacgtcttttattaattaattattttaaaacctagtgaaatactaactaaaaaaagaaacttattaaatttcgtatgaataatgtacaaatctaaaaataattgataaacaaaattatattgaattcaagtcgttaaagcacaaagtctataaaaaaaataaaaatagcataatattaaaaaatgtatggattagagatgatttacactaatatagcctaacaaaaattattattagttaaattaacaatttctaatccacattttttaatatataattatattatatatgtttaaaaaaaatatatgcacaataatgtcatcttagtctactcaagccatatcttatataata

SEQ ID NO: 19915 - DNA, 243 bp, Glycine max
  unsure at all n locations
agcttcaacatttcttatcgagcgtttcgatatattacgggactgaatcagacatccgagtaanaagttatcgtcgttataatttgctcagagcttcggtattgcatttcgagcgtctcgatatattacgggactcaatcagacatccgagtaaaaagtttttgtcgttagaacttgctcagagcttccataatcaatatccagccgttccatatattactggactcaatcctacaaccgtgt

SEQ ID NO: 19916 - DNA, 386 bp, Glycine max
  unsure at all n locations
agccttccctctttttaccaattacccttcacccaatttaaatccatcttggccctttttccacaactctaataaatgggagagaaatgttcatctagaccatacaagtccctaatattatcagatcctacaatttgagctcctatggagcaaaacaatgtgtgtctcctagagagggcatcagctaccacatttgtttttccctttttgtatttgataacatatggaaattgctctatgtactctacccattntgcatgcctcttgtttaacttgctttgccctctaatgtacttaagtgattgatgatcactatgaatgacaaattccttggaaacaaggtaatgttcccaagtttggagggctcttattaaggcataaagctc

SEQ ID NO: 19917 - DNA, 442 bp, Glycine max
  unsure at all n locations
agctttgaatgctctattcaatggagttgacaagaatatcttcagactgatcaacacttgcacagtggccaaggatgcatgggagatcctgaaaaccactcatgaaggaacctccaaagtgaagatgtccagattgcaactattggctacaaaattcgaaaatctgaagatgaaggaggaagagtgtattcatgacttccacatgaacattcttgaaattgccaatgcttgcactgccttgggagagaggatgacagatgaaaagctggtgagaaagatcctcagatccttgcctaagaggtttgacatgatagtcactgcaatagaggaggcccaagacatctgcaacatgagagtagaagaactcattggntcccttcanacctttgagctangactctcggatagggctgaaaagaagagcaagaatctggcgttcgtg

SEQ ID NO: 19918 - DNA, 416 bp, Glycine max
tgcatgccagcctctattgcttttattcattcttacctggggctatctcaaaccttgtatttttgttgtctatgatattgcatacacctccttcagagtgaagtgtgtagcctctctccatcatttggccaatgcttagaagattgtcttttaggctgggaactagtaagacatcatggatgagtcgcgtacctttatttgtctccaccatgatagtgcctttgccttttgattcaaccacacttgtatttcccagttgaactatgactttgacagactcatcaatacttttaaaaatagtcttatccttggccatgtgattgctacatccactatccaagtaccagtttcctcccttttcttttatcgagtcttgagtggcgtagaacgtacattgttcttgatcatgctcctct

SEQ ID NO: 19919 - DNA, 410 bp, Glycine max
agcttcatatttgatttatgtgcaaccatatcccttaaagtcctctcacgaggtggaggttgtgccatgttctcagaatgtgcatgatcagaatgctcagaatcagaatgctcaatgaaattctgataccaatgccagatgtcgtacaggatgtcacgacatcacgcttcagaacatgcagattatctctgagtgtatgaacagattaaacatgtctataacacacgataattgctaacccagttcggtgcaacctcacctacatctgggggctaccaagccagggaggaaatccactaaaatagtgttagttcaaggtctaacagccactatttacaaccttctcacctaaccactacccgtgcgacctctacctatgagccactcttatatatgagaacccctctcac

SEQ ID NO: 19920 - DNA, 359 bp, Glycine max
agcttatctgttttgtccttcctcagtgtcctgaatcgatcatacaacaacttatcaggcagaattctcacgagcacccaacttcagagctttgaagaacttagctacactggaaatcctgagctttgtggtcctcctgtaacaaaaaattgcacagacaaggaagagttgacagagagtgcttctgttggacacggtgatggtaatttctttggaacatcagagtttgatatcggtatgggagttggatttgcagcaggattttggggtttttgtagtgttgttttcttcaacagaacttggaggcgtgcttattttcattatcttgaccacttgagagatctgatttatgtgataat

SEQ ID NO: 19921 - DNA, 440 bp, Glycine max
  unsure at all n locations
agcttctcacttattatgcagcatttcaatttgcaaaagagaacggcattgatcttgtgtcagttataacaagcactgttgcaggccctttcttcacggctaatgtactaacaagtgttaaagttctactgtcgccattaacaggtgattttatcattaatctacatcttattcgttcatacacattgaaatgacttattttagttaggtaactaccatcttagctaacttcgtccccagagaaaagaaagtgttatctattagtatgtctatgtatgtgttagaaatgaaagctatattactaaatgttatataagtgtatcaacattaagtattttatntcaataacttctattcaattcatgaatttgtgaacttcggtactatctcttatgccaagttcccncaatatattgtacctctatgcttctaagtgcatc

SEQ ID NO: 19922 - DNA, 343 bp, Glycine max
agcttgtttatttcacccatatgcttcttattggcttgtgggaccaaatcccatactacattccttttaaactcatttaattcatcatgcatagccaataaccaatgctcatcatgcaatgcttcatctatctttctaggttcaatatgagaaacaaaagccatgttattgcatacaattctaagtttagagtgggtggatactcccttagatatttcacctatgatgttttccacagagaggtctctatgagttctccactcctttgggagttctttatgatgtgtggcaatgacttacttgctttgttcaagatccttaaccattggttcatcttcaagtg

SEQ ID NO: 19923 - DNA, 379 bp, Glycine max
ggagaaccaagccaatcagaatgctagacgatttatagatgtgaatataggtaacaatggcggtaatgacggaccgaggcagaaccgggttgagggagtaaagctcaatgttcctcccttcaaaggtagaagtgatccagatgcctacctggactgggaaatgaagactgagcacatattttcctgcaatgactacactgatgcgcagaaagtcaagctagcagcagctgaattctccgactatgcccttgtttggtggcataaataccaaagagaaatgttgagagaggaacggcgagaggtagatacatggactgagatgaaaagggtgatgagaaaaaggtatgtgcccactatctataacagaaccatgcgacag

SEQ ID NO: 19924 - DNA, 236 bp, Glycine max
  unsure at all n locations
gcgcaaacactgaagagaccggcgggtagcaaactttcatcaanaanaaaatcatgacctttcgagcatgatatacaatccatgttggaggaatcatctcaatctgagatagacatagtnctccactacaacatcagcctgtccctactttccaaaatgctactggtccaagcaagccatatgttccttctcaaatgcaacaactacatgtgcattcacaacaaagacaactagca

SEQ ID NO: 19925 - DNA, 423 bp, Glycine max
atagaaactcagctttgctgcaatatttacaatagacctcctcactctcagctgtataatcaaccacagcatagcagttatgacctttccagcaacagatacagccctggatggatgaaccaccctaacctcagatggtccagccctcagcaacaacaacagcagcctgctccttccttccaaaatgctgctggcccaagcagaccatacattcctccaccaatccaacaacagcaacaaccccagatacagccaacagttgaggcccctccacaaccttccctcgaagaacttgtgaggcaaatgactatgcagaacatgcagtttcagcaagagaccagagcctccattcagagcttaaccaatcagatgggacaattagctacccaattgaatcaacaatagtcccagaattctgacaag

SEQ ID NO: 19926 - DNA, 407 bp, Glycine max
  unsure at all n locations
tactcagcttcgctcttgaacgggcgctatcctatcctatttctannncttttttttgtaanangnctaagggcgcgtttgcggccttgtcctgttttttgtccttgctctatcaaatccccttatctagattctcctctaaattctgagcgttttgatatatagtgggcctcaaatggacaaccataacaaaagttatgagcatttgaagtttacttgccctatctattgacatatctgttatcctatctaatatcttatctgttatcctatctaatatcttatttgatttccgatctattatcttatctattatcctatctaatatcttatttgatatcatatctggtacccaaattagagctatctgctatccagatccaatctaatatattattatccaaatc

SEQ ID NO: 19927 - DNA, 427 bp, Glycine max
  unsure at all n locations
caccatcacatgggggtagattggtgactctttactgtcttttcctccttttttgagagcctcaaacatttctgcaccaacgtcctccaagaagaatttcggcagaacggaccttccaactctgaagctcgaagctttgatcccaaagaagcatgccatgaccattatcttcaagcccatctcttttcccagcacacaaacaaaagggtatagaagaaccaaaactatggctcttataagcccccctgcctcaaaggccacgagcatgaaatatgggaacaaagaagaggatttcaacaacgcgttttcgacatcaaagatcaacgtgtgatcgttgaggtctgatcggtggattagagaggggaatttcanggtattgttaaactgtgttgttgcacccgaaaaagaatggctaatggttctgtgg

SEQ ID NO: 19928 - DNA, 419 bp, Glycine max
taatgaccctcaatctttcaatgattatagatccatctcccttattggtgtgtctataaaatcgtggctaaagttctggccaagaggctggcccttgtgttacctcatcttatagatgaaagacaaacggattttatgaaggggaggcacattcttcatggtgttttgattgccaatgaggttatagctgaggctaaggctagaaataaaccttgcatggtcttcaaagaggattttgaaaaggcgtatgattcggtttcttgtggttttcttgactacatgttgatgaggatgggcttttgtgaaagatggaggaaatggattaatggtttcctgtccactgcaaccatatccattttaattaatggaagtctgtttttggagatgccactcaacataatgttagaaccttaaaatgt

SEQ ID NO: 19929 - DNA, 331 bp, Glycine max
ttctgttataaaggttgatgaaagaggattgatgtggttctacactggtgacatatggagattccataaagatggttgccttgagatcattgatcggaaaaaggacatagttcaactcacacatggagaatatgtgtccttgggaacagtatcaatgtcggcttgtggaacgcacttcctttaatatttaataataatattatttaatacaggttgaggccgctgtttcttgcttccctttgtagacaatatcattgtgcatgctgatccttttcatagctactgtgtggcactccttgtatcttctcattctgcttcggagcattgtgct

SEQ ID NO: 19930 - DNA, 389 bp, Glycine max
  unsure at all n locations
ntatgatgttcaacagagactatgttgacataattgaagattgttcttgttgctcctaatgcctgatcgttatgaattgtaatctcacattagagtcttctatctttgtagtataattatgactcatctttttgacgcacaaattaaatntaaatatgtatctgacatagttgccattaatcgtattttaagtaagttatctatctttgtacgtttctttaatgtagtggcacgatgaccaagttatctatctttaattagtgttacttagtttataattaattattacttaacgcacataggccaaatctaattctatatattaattttaggtcaagatcaatcttattttaagtaacttaactatctttctatgtgtctaatgtgga

SEQ ID NO: 19931 - DNA, 434 bp, Glycine max
  unsure at all n locations
cttataattntcatatgataataaacttctacaaaaatgtacctagatccataatattccacaatgcaaagaatttaagaataaaacttcctaaattctttaataaagattctcacacacacattatatacacatacacatagagtatgattattatgtgaatgacaatcttatatgagaatgagaatagttaatttcaatcattggattgaaatgaaagatttagattaaaaatattttaaattcaaattanaacctcatgtaatcataaaatctctaagaaattaatcaaatatctaatttatcacgtccaaatatatcttanacctatcatcaccattatgatcatcagtccaccaccatcgccatgaccgttgtatgtcaccaccaacatgattgcgacagtggcagcaacaacgattatagtcattgtg

SEQ ID NO: 19932 - DNA, 424 bp, Glycine max
  unsure at all n locations
nntaaaacttgcattctaccctctgatcccttatttacttattgctttctctaattatggttacagaaggaccggctactttcaacccctcttgaacaataaggtttaaaatgtgagcacaacattggatatgaaaaaattcaccaccacttactaaaccattagcatgcaaaaaaagtctttccttcaaatagtcttgcattttatcattggaagaagcattatctagagttaatgaaaatactttctgctcaatcccccattcttccaaaaaaccatatataactttagccttctcacgccccgagtgtggaggaggaaaatgagaaaaattaagcattttactattcaacttccaatttgcatcaacataatgtgcagttaatgaaatataaccctcagaagtacaagatgtccacacatc

SEQ ID NO: 19933 - DNA, 421 bp, Glycine max
  unsure at all n locations
tctacaacaagctagaaatataaaacgttatcttttctcatctttaacacttccccctcaagctggagcatataaattgtgtgctccaagtttggaacatataaagtggatctgaggacctctcaaggacttggtcangatgtctgcaagctggttgttggacttaataaattcagtactgatttctttggactgcagcttttccagaacaaaatggcaatcaatctctataggtttagttctctcatgaaatacagaattagaagcgatgtgaagagctgcctgattatcacaatacaacttcatctgctgaatatcacaaaattttaattcttgaagttgtttaatccacaccaattcacaagtaacaagagccatagctctatattctgcttctacacttgatcaggcaacaacacac

SEQ ID NO: 19934 - DNA, 444 bp, Glycine max
  unsure at all n locations
ntcgcagataatgtcaatgccccaccgcatcccctgaatgtctcgtccgccccttggcctttctccatgtggggaatagatgtcatcggggccattgagcccaaggcctcgaatggtcatcgcttcatcctcgtagcaatagattatttcaccaagtgggtcgaggcggcttcatataccaatgtcacgaggaatgtggtggtcaggttcattaagaaagagatcatctgccgatatggtttgccaagaaagattatcacggacaacggcaccaacctgaataacaagatgatgggggaaatgtgcgaggagtttaaaatccagcatcacaattccacaccctaccggccaaagatgaatggagccgtggaagcagccaataagaatatcaaaaagattatccaaaagatgactgtgtcatacaaggattggcacgagatgctc

SEQ ID NO: 19935 - DNA, 405 bp, Glycine max
tataatatattgatacgctcgaaattaaacgtcggaaactcttgagaaattcaaatggtcataacttttcacacggatgtccgattcgggcgcataatatgtcgagaggctcgaaattgaacaacggaagctcttgagaaattcaaatggtcataacttttcacacggatgtccgattcaggagcatcacatatagagacgctcgaaattcaaatggtcataacttttcacactgatgttcgatacaagcttataatatattgatacgctcgagattaaacattggaaactctctagaaattcaaatggccataacttttcacactgatgtccgatttaagcgcataatatgtcgagaggctcgagattgaataacagaagctcttgagaaattcaacatggcat

SEQ ID NO: 19936 - DNA, 291 bp, Glycine max
  unsure at all n locations
gtcactatatgtgacgccccacaatcggacatncgacttaaatgttatgaccatctgaatttctcaagagcttccgttgttcaattctgagcgtcttcgtatgtgatttgtctgaatcggacatgcgtgtgaaaaagtatgaccatttgtatttctcaagagcttccgattgacaatttcaagcctctcgacatattatgcgcccgaatcggacatccgtgtgaaaagttatgaccatttgtatttctcaagagcttccgatgttcaatttcgagcctctcgacatattat

SEQ ID NO: 19937 - DNA, 468 bp, Glycine max
tcttggagtcttctatgcaatgcccttggggggtaggattactatattctctccccccttgaaaaggatttgatctcaaatccataggttcttgaaactcatggattctttcctcaacacctctaaaaagaataaaaacatatgtattagtgatgttgggtatgttagagtacgataaggactgaaaacccctttcttggccatcttcccatgagagaatatagttcctcaccaactcagtgagtggtgctacaagtatagaaaaatatgggataaacctttcgtaaaagtttgttaagatattgaagcccctaatttcccttatacatggcggagtaagctactcaagaatgacctttattctcttagggtccatgggaagcccttgatcactatttaaaaagttaaggaaagtaatggaataaaatataccttttttctttattttcatgttgattattcctacaa

SEQ ID NO: 19938 - DNA, 458 bp, Glycine max
  unsure at all n locations
ctttgatactntgaaacagaaactgacctctgctcccataatctttgctccaaattggacaatagattttgaaataatgtgtgatgcaagtgattatgcagtaggatcagttctgggtcaaaggaaaaataaaatttttcatgtcatacactatgaaagcaaggttttaaataaagctcaaataaattatgccacaactgagaaataattgcttgcaatagtatatgctttggaaaaatttagatcttatttgataggatctaaaattatggtttttactgatcatgttgctataagttatctgttagttaaagctgattctaaaccccaacttatccgatggattctgttgttgcaggaatttgacttaaagatcaaggataaaaagggaagtgaaaattatgtagttgatcatctgtctaggctgaccaatgatgaggtgatcacacaagaacctg

SEQ ID NO: 19939 - DNA, 424 bp, Glycine max
tggactcgatggggccgatgcatgttgaaagccttggacgaaagatgtatgcctatgttgttgtggatgatttctccagatatacctgagtcaattttatcagagagagatcacacacctttgaagtattcaaggagttgagtctaatactgcaaagagagagagatagtgtcatcatgagaatcacgagtgaccatggcagagagtttgaaaacagcaagtttactgaattctgcacgtctgaaggcatcactcatgagttctctgcagctcttacaccacaacaaaatggcatagttgaaaggaagaacaggactctgcatgaagctgctacggtcatgcttcatgctcaagaacttgcctataatctctgggctgaagccatgaacacagcatgctacatgcacaacagagtctcacttat

SEQ ID NO: 19940 - DNA, 398 bp, Glycine max
atactcaaccttctagatgagttatgtctgcgaatcggacatcctgtgatatgttattaccatttgaatttctcgagtgcgtggcgttgtttaatttcaagcgtctcgatattttatgtcctcaaatcagacatcggagcgaaatgttatgaccattcgaagttgtcgagagcttccgtttttcaatttcgagcgtctacatgagttatgtcaccgaatcatgacatctgagtgaaatgttatgaccattccaatgggtcgagagcttccgctgttcaatctcgagcgtctagatgagctatgtacccgaatcggacatacgcgttaaaagctgtgaccatgctgatatggcgagagctggcgctgttcaatcacgagcgtctcgtattattatgtcc

SEQ ID NO: 19941 - DNA, 339 bp, Glycine max
  unsure at all n locations
aaaaggtaatattgtagccgatgctctttctcggcgtcatgcattactttctatgcttgaaacacaattgattggtcttgaatgtctgaaaagcatgtatgaaaatgatgaaactnttggagaaattttacaaattgtgaaaaattttcagaaaatggtttctttagacatgaacgctgtcttttcaaagaaaacaaatcgtgtgtgcctaaatgttctactagaaatctgcttgcttgtgaagcacatgaaggagggttaatggggcattttggggtccaaaagactctataaacattacaagaacattnttattggcctcatatgaaaaaggatgtg

SEQ ID NO: 19942 - DNA, 243 bp, Glycine max
  unsure at all n locations
tgttgatgcaagaggagcatcccattgcatantttagtgagaaatcgaatggggctgctcttanctattctacatatgataaggaattgtatgccttattaagagctttgcagacttggcagtataatctcttgcccaaggaatttagtattcacagtgatcataagtctttgaatacttgaaggacaaggaaagttgacaagtgcatgccnatatgtggaattcttgacaattccccatgtg

SEQ ID NO: 19943 - DNA, 462 bp, Glycine max
  unsure at all n locations
agcttgtntaccccatgttgaatntgctttctttatagctgttcatagcaccactaattgttctccttttgaagttgtttatggttttaacccactaactcctcttgatcttttgcctatgcctaatgtttctgtttttaagcataaagaaagtcaagcacaggcggactatgtgaagaagcttcatgagagagtcaaagatcanattgagaggaaaaataaaagctatgctaaacaagccaacaaagggagaaagaagggtgtcttcgaacccggagattgngtntgggtgcacatgagaaaagaaaggtttccggaacanaggaaatcaaagcttcaaccaaggggagatggaccatttcaagtgcttganagaatcaatgacaatgcttacanagttgagctgcccggtgagtataatgttagttccaccttcaatgtctctgatnntatctcttttga

SEQ ID NO: 19944 - DNA, 455 bp, Glycine max
  unsure at all n locations
taattattcatgcactatgtgtattttaatgnttcaaaacngtgngttcttaaatctaaatagcttagttggagaattaaatttaaaaaataattataaaataattacataactcttcatgcgatattcacacctttataacataattagtagtatctaacaccttatattttgtatatataattttaaaaataattataggaattcattaatgtacacctacctatttttttagaagtagttactaaattacaataagattcttaaaatacatcccaggcctaagttgttaagattatgtttaataagatattttaggagtctataagttattttgactaaagtaaacttgtctaatacatgagtttantttttataaactaccttaagagaacttattttgataagttacttaaacttataaaagataagctaacttaaaagtttcttttcat

SEQ ID NO: 19945 - DNA, 467 bp, Glycine max
  unsure at all n locations
agcttcatacaactgagacatggtagaataatagngtactccaggcatngccgttngctgagatctcatcacccttacagactatcgaaaaaagcttttaatggaagtcaagagcacgaaactgcgctgataccattgactggtgaataggtcttccagtgggttgaacacctgaatactgtatttggaaagacctaaaagaaggataaaagtaagacttgcatatggaagaagaggtccattttctttgatatttcgtattggtttgatctagatgttagacattgtatcgatgttatgcatgtggagaaaanagtatgtgatagtgtcattgagacgctccttaacattcaatgcaagatgaaagatggtctgaatacccgtcatgatctatctgacatgggtatacgatcgcagttgcatccaaagtctggtgggaaaatatacttgcctccaacttgtcatac

SEQ ID NO: 19946 - DNA, 437 bp, Glycine max
tatagaatatataataaaagaactatgactattgaagaatcattcatgtttcctttgatgagtctaatgctatttctccgagaaaggatattttagatgatgttgcagaatctttagaatgaatgcatattcatggacaagattctaaagggaaagggaaaggaagcaatgaagatcctcccgaagaagatcatccccttgacaacattattggtgatatctcaaaaggggtaacaactagacattctcttaaagatttatgcaataatatggcttttttatctatgattgaacctagaaatataaatgaagccatattagatgatcattggatagttgctatgcaagaagaactaaatcagtttgaaagaaacaatgtgtgggaattagtaaagaaacctgaaaattgccctatcataggaacaaaatgggtattt

SEQ ID NO: 19947 - DNA, 462 bp, Glycine max
  unsure at all n locations
tgcaagctattaagcccaatcaaaacccacgtcgtcacatacccgcacacaatcgcggnccacgggtctactacggcacagcccgatgtaatcgcagcgaacccgtcaagcaggccgttacatccgtcaatcgcgttccaatggcccaccaataaccgcagtgctcccagccaatgccgtcgtgacagctgtcctccctatcgcgctccattgaccataatacccttcgctatagtgataaacgaaccagggttgaagccgtaccacccgaaccacaacataaacgaaccaagcacaactaaagacgcgctgtggccacgcaaagccacagaccggcccgtccggtcgaaccggncgattctcgggccttcaattaaagccccccacatgctcgctatcccgccaaccatgtgaacaacgcctgagcccgcaaagtcgatgactccagacccgaacaaaaca

SEQ ID NO: 19948 - DNA, 414 bp, Glycine max
  unsure at all n locations
agcttcaacattcaatttcgagcgtctcgataagttataggactcaatcaaacatccgagtgaaaagttatggtcgttggtattggctcaaagcttcaactatcaatttcaagcgtctcgatatgttacgggactcaatcagacatccgagtaaaaagttatggtcgtttgtattggctgagagcttcaactttcaatttcaagcgtctcgatatgttacgggactcaatcagacatccgagtaaaaagttatggtcgtttgtattggctcagagcttcaactctcaatttcaagcgtctcgatatgtnacgggactcaatcagacatccgagtaaaaatgtattgtcagtntgataggctcagaggttcaactttcaatgtctagcgtctcgatatgttacgggactcaatca

SEQ ID NO: 19949 - DNA, 431 bp, Glycine max
  unsure at all n locations
cgcttaaaggtactttcatacacagtaaataaatgaggaagaattcttctagagaaaataagttatgtattataatgtaaaattattttacattaatattcaattataaattaacatatatgataaatttgttgatatttataataactaccttgaaaatcgtaataataacgatattttattagtttagtataaaattattttaatttgtcatgactattaaattctttaaatatttaatataccactattttcataatgaatgatattatggtgatcagtgttatgaacaattttaataaatgtaaatgttaattccttcgccttaacttcaataacttacaaattntataaatgtcattgttttatttgaataatataacatttgaattaacataaaggtcaaaggatgatcgtctatttagcttaat

SEQ ID NO: 19950 - DNA, 425 bp, Glycine max
  unsure at all n locations
tgaagagaatgcaagagagaggataaggaaacctattattttaacatggaaagaaataaaggagtttataaggaagatattcttaccaccttattatgagaaatatgtttatgataggctacaaaacctcacaaaaggtagcaaaagtcttgaagaataccataaagagatgataatgaccattaggaaagccaatgtacaagagcctaaaacttccataacaaggttcctatgtgggcttaataaagacattcgatgcattgtgaagttacaacactataagagcttggaggatatggtgcatcaagccaagaaagtggaaagacgacttgagaggaagcattcctacaagaagacctatcaccatgactcttcccgtggtaaggacaagtctaagaaatagggatcttccncacctgtaacat

SEQ ID NO: 19951 - DNA, 469 bp, Glycine max
  unsure at all n locations
agcttaatgagtttcttgtgtggtctcttgattaaattgatgcatgtttaaaaaagtatcatgtcccagacgaaagtatttctctattcagtgttttctgcagatatggngaacgggatgactcanaatccataatgacagattgctcctcttcagtatcatctggtctggactcagattggtgttgttatatcaagttgagaatgaaagaaaaaggactaatcctattagtagtcatcagatagatgaactatgtttggatgaatcgttgcgatttgagacattaaatcaagtagttgaggctgcgccagattcctctacccttgccaaaacctttgattntgttatgtcaaaagatgctggaagatccagtgacttagcanacgcaagtntgtccatgagtgagttttcggtcanaagccagcaccggtgcgctacaatgagaaaccttctggagtctcttatcaca

SEQ ID NO: 19952 - DNA, 433 bp, Glycine max
tctagtctcaattgtgagggtctcgatatattacccggttcattcggacatccaagtaaaaagttattgttggctgaatttcctatgagcttcggttttcaatttgtagcgtctcgatatattacaggactcaaccggacatccgtgtataaagttattgtcatttcaattttctcagagcttcggatctaaattttgagcgtctcgatatatgacgggactcaatcagacatccgagtcaaaagttattgtcgtttgaatttgatacgagcttccgttttcaatttggagcatccctcgataaattacaacactctgtcgggcatccgagtaaaaagttattgttgtttgaattttctaacacgtttcgttttcaatttggagcgtctcgatatattacgggactcaaccggacatccgtgtatacagttat

SEQ ID NO: 19953 - DNA, 474 bp, Glycine max
  unsure at all n locations
agcttctaaactntgacaagaatgaagctctgataccacttgttagacaagtggcctcagatatcttaagaaggggggggttgaattaagatattcgaaactttntcttctaattaaaaatctatcttactttntacttaagttatgaattcccttanagacaatcttcttanatattaattcanatgaagcaacttgaatatgaatataaagcaataataaataaaggagattaagggaagagaaaatgcaaactcagttntatactgggtcggccacacccttgtgcctacgtccagtccccaagcaacccgcttgagagttccactaacttggaaattccttntacaagttctaaacacacaaggacaacccttcctttgtggtagagattctnacaacaagagactcacagtctcttaatcccttagagaatgagaagaagaagaggaacanatctctcttgaaagagat

SEQ ID NO: 19954 - DNA, 435 bp, Glycine max
  unsure at all n locations
tcagcacttctgtagggtttcagggctttccatcagctctgtattaatctgccatatactcagccggtattaggcctcatgagctttctcatattcagctgcttactggatttagcttgggtggcttcccttttagatacttgggtgttccccttttatcatctagattaaatgtatatcactatgctcccttgctttccaagattactggcctgattcagggatggagcaggaagtctttatcttatgcaggtaagctagagttgatcagagcagttattcaaggaattgtgaatttctggatggggatttttcctttgcctcaatctgttctggaccggatcaaggcttcatgccgtaattntctgtggggcaaagcggatattggcaaanacaagcccttggttgcttggtcagtagtttgttctccgaaaa

SEQ ID NO: 19955 - DNA, 440 bp, Glycine max
  unsure at all n locations
agcttgagcacctccttccttacctcttccttcattgttgggttcagccttctctgaagttgtcggactggcctgtagtcttcttccatcattatcttgtgcatgcagtaagcagggctaatacctttaagatccgatatatgccacccaattgcttccttgtgtttcttcagaatttctactaacttgttttcttcatcggatgtgagtgtattgctgatcaccataagcttactctcatcttcttctangaacacatgcttcagatgggtgggaaatatcttcaattctaccttcttcttcttagatggagtcttgctctttagttcctcanaactggcctcctcctcanggatgttatcttgtcgatccaagtcttctaagcaagccttgagatcttcttcttcttcattggttaagcaatctatcgcattcaccat

SEQ ID NO: 19956 - DNA, 427 bp, Glycine max
  unsure at all n locations
tgtcatactttgtccaanaaagagaaaatcagtttttgcctgtgtctgcgccgggttaaagtcctacaaggatactcttcaaatattaagagccttgtgcagttgaagaagcttaacctagtggggttaaagtctcatgattgtcacatgttgatgcaacaattgttagccgtggccatacgagacattttgcctaacaaagtcaggttagccataactcgcctgtgctttttcttcaatgccatgtgtagcaaagtccttgatcctgtcaagtttgatgacctggaaaacaaggctacaattatactgtgccagttggagatgtattttcctcctgctttctttgacatcatggtccacttaattgtttaactggtcagagaaatcaaatgttgtggtcctgtatatctgtgctagatgtacccgg

SEQ ID NO: 19957 - DNA, 438 bp, Glycine max
  unsure at all n locations
ntctccactaagtagcctgatgcctgaaatgtcttttctgattgtgtggtcctagatgcagggaagattttctccaagaacaccctcttaaggtcatcccagctgaaaacggacctgggagcaaggtagtatatccaatcttttgtcactccctccagagaatgaggaaaagcctttagaaagatatgatcttcttggacatcaaggggcttcatggtggaacaaaaaatatggaactccttaagatgcttatgaggatcttcacctgcaagaccatgaaactttggcagcaaatgtattactccagtcttgagaacatatgaaacaccctcatcatgatattgaatgcacaagctttcataagtgaaatcaggtgtagccatctccctaagagtcctcttacgaggtggaggttgagccatgttctcagtatgaaaa

SEQ ID NO: 19958 - DNA, 434 bp, Glycine max
  unsure at all n locations
agcttctgttgtgacatcttgacttgcttcccaatctgacattcaccacagattctgcctttntctattttcagattgagaatgcctctaacagcacctttgtcaatgattntcttcatgcctcttaagtgcagatgtccaaatctttgatgccatattttgacttcatcttctttggaggatagacatgtggaggagtaactggtttcttgaggtgtccataggtaacagttgtcctttgatctgctgcccttcattagaacttcactcttctcatttgtcaccaagcattctgactntgtgaagtttacattgaatccttcatcacacaactgactgatgctgatcaagtntgcagtcagtcccttcaccagcagtactttgttcagactangaagtccatcatggactagctntcccattccagtgatctt

SEQ ID NO: 19959 - DNA, 390 bp, Glycine max
  unsure at all n locations
agcttgtatgatgcttcattggaggaaaagaaagagggagataaagatagaggtgggagcacgaaattgaaggaataanagagggagagaagtggaactttgatgaatgagagtgatgcaagctccattggagcttgtatgcctangatcttcttcatcagtggattcctttgcttcttggaagataaatggccgcggaatggagaaggaagagagagaggagacgccgcttcaatgagaagataagtctagaagaagctcaccaccatacgaggccatggataagagcttggaggacgaaagagatgaatgaagggaggtggagagaagagcacgatattctgtgctcagatagagctctgagatctaaagttaatattcanatgatca

SEQ ID NO: 19960 - DNA, 439 bp, Glycine max
taagaggccatggagattgagatggagacagacacgtgtggtttatagatttcacctgtattagttttctcaaacattatctttgcccccaattacatgattagatagccttgtgacaatcaagggagtaccattacataaaccttcaatttgatctaaattccttaaaagcatcattggtgtgccaatcttcaatttgattttatgatttggaaggccgatgttccaagagaatttgaaaattcaagggttaaagcctcgaatatttggtcttcatttgattataaattgtcaaaagaatctaagcttagatattgtttttcaactataacataattgtaaacaatttaactaatttgattgtttcaaatgaaagatatttgtgtaactttttcaaatggtagatgagattacatcgatttaaagataatacatattc

SEQ ID NO: 19961 - DNA, 341 bp, Glycine max
  unsure at all n locations
agctnatagccaattcanacgacanataacttttacgcgaatgtctgattgagtcctgtaatataacgagacgctcgaaattgaatgttgaacctctgagccaattcaaacgacaataaccttttacacggatgtctgattgagtcccgtcatatatcgagacgctcgaaattgaaagttgaatctctgagccaatccaaacgacaataactntntactcggatgtctgattgagtcccgtaatataacgagacgctcaaaattgaatgttgaagctctgagccaattcaaacgacaataactntntacacggatgtctgattgagacccgcatatatcga

SEQ ID NO: 19962 - DNA, 466 bp, Glycine max
taaatattcaatttcgagcgtctcgatatattacgagtctcattcaaacatccgagaaaaaagttattgtcgtttgaatttgctcagaggttcaacattcaatttcgagcgtctcgttatattacaggactcaatcagacatccgagtaaaaagttattgtcgtttgaattggctcagagcttcaacattcaatttcgagcgtctcgatatatgacaggacgcaatcagacatccgtgtaaaaagttattgtcgtttgaattagctcagaggttctacattcaatttcgagcgtctcattatattacaggactcaatgagacatctgactaaaacgttattgtcgtttgaattggctcagagcttcaacattcaatttcgagcgtctcgatatatgacatgactcaatcagacatccgagtaataagttattgtcgtttgaattggctcagaggttcaacattcaa

SEQ ID NO: 19963 - DNA, 407 bp, Glycine max
  unsure at all n locations
agctnagattgctctattcaatggagtngacaagaatatcttcagactgatcaacacttgcacagtggccaaggatgcgtgggagatcctgaaaaccactcatgaaggaacctccaaggtaaagatgtccagactgcaactattggctacaaaattcgaaaatctgaagatgaaggaggaagaatgtattcatgacttccacatgaacattcttgaaattgccaatgcttgcactgccttgngagagaagatgacagatgaaaagctggtgagaaagatcctcagatccttgcctaagagatttgacatganagtcactgcaatagaggaggcccaagacatttgcaacatgagagtggatgaactcattggttcccttcaaacctttgagctaggactctcggata

SEQ ID NO: 19964 - DNA, 461 bp, Glycine max
  unsure at all n locations
nttgcaagttggaatcatttatcctatctccgacttccaattggtgagtcccgtccaggtagttacgaagaaaaccggcctcgccgtgataaaatatgagaaggatgagttgattcctactcgggtgtagaacagttggagagtatgcaacgactataggaggctgaaccaggttaccaaaaaggaccattttccactgtcattcattgaccagatgcttgaaagcctggcaggtaaatctcactactgtttccttgatggtttttctggttatatgcaaatcactattgcttctgaggatcaggaaaagaccacattcaccttccccttcggcacttttgcctataggaggatgcctttcgacttgtgcaatgcccctggtaccttccagcagtgcatgattatgtattttagtgattttttagaaaattgcatagaggtgttcatggatgatttcacta

SEQ ID NO: 19965 - DNA, 433 bp, Glycine max
  unsure at all n locations
ntttgaaagaatggaggagaggaagaaaatagaatagcactcgtctttgcccgctgaaattttctggacagagcatatgttgaacaaaaactcttagaaagatattgagaaattggttgttttaaattcatgccatgatcacatatttatagccatttgatggctcctgaagaagccatgttaaaagttgtgacttttggcaatttcttcaaaaccagttagttactttaaaaagttgtgacttgacaattttttcaaaaccagtcactttaaaagttgtgactcttgacaatttcttcaaaatcagtcactggtaatcgattaccataatggtgtaatcgattacacagtttattttatcaaaagttgtgactcttcatgttgaggtttgaaatccaacgctcaaaaaccattagtaatctattacaaatat

SEQ ID NO: 19966 - DNA, 449 bp, Glycine max
  unsure at all n locations
ggataaaatngaagctatttccttaatctcgcaggctttggtttgctctttaatttcctttcaacttacgtgctacccagttaaataaacagtatgtaactataactaatttacagtagctgctttgtttatgtaatacataacaataaaaataagcagctttgtctatgtcatatatgtaaaataaattaataataaaatttctattagtacctataacaagtgtggcgttcctcatgatttttataattatgatttgatgtatagaatttcatatatagaatggttatgaaaataatatacatggagagaaagtaattttaattgaatataattagaataaattattaaaatattagacatatatacttggtttcaaatttattttaaaaataaaataattggtatttatatacacacatgtacgtgcaccagaaacaaattaatat

SEQ ID NO: 19967 - DNA, 444 bp, Glycine max
taggagaatgaaacccgaaatgtcactaagaatcaaggtatgatgcgaaaaagcagttcaacgctggtttcttggcggtatctcgataccctgagtgggtggccaacattgtgtcggtccctaagaaggatgggaaggtatgaatatgtgtggattatcgggacctaaatcaagccagtcccaaagacaatttccctctacggaacatcgatgtcctcgtagataacacgaccaattttgctttgttctccatcatggacggtttctcaggctacaatcaaataaaaatggtactagaggatatggaaaagaccatgttcgtcaccctgtggggaacgctctgctataaggtgatgtcttttgggctaaaaaacgctggggcaacctatcaacgggctatggtggctttgttccacgacatgatgcaccgagagatcgaagtct

SEQ ID NO: 19968 - DNA, 416 bp, Glycine max
  unsure at all n locations
agctagattggttttgtgatagnngatttgcaggagatgttgatgatagaaaaagtactaccggatttatgttttttatgggtgattgtgtttttacatggagttctaagaagcaagccattgtgacactttctacttgtgaagccgagtatgtagctgcaacttcttgcacatgtcatgcaatttggctaagaagatngttgaaggaacttcacttgttgcanaaggaaaacacaaagatctatgttgataatagatctgcacaagagcttgccaagaatccggtgttccatgaacgaagtaagcatatagatacaaggtatcatttcattagagagtgcattgccaagaaagaagtagaattgactcatgtgaagactcaagatcaagttgtggatattntcaccaagcctctc

SEQ ID NO: 19969 - DNA, 461 bp, Glycine max
  unsure at all n locations
tctatagaaggttcattcctaatttctctacaattgcatcactgctcaatgagctggtgaagaaaaatgtggcatttacctgaggtgaaaaacaagagcaagcctttgctttgctcaaagaaaagcttactaaggcacctgttctagctcttcctgacttttctaaaacttttaagctagaatgtgatgcctctggagtgggagttagagttgtattgttacaaggtgggcaccctattgcttattttagtgaaaaacttcatagtgccaccctcaactaccccacctatgataaagagctttatgccttaataagagcccctcaaacttgggaacatttccttgttngcaaggaatntgtcattcatagtgatcaccaatcacttaagtacattagagggaaaagcaagttaaacaaaaggcatgcaaaatgggtagagtacctagagcaatctccatat

SEQ ID NO: 19970 - DNA, 414 bp, Glycine max
gtgaatgctctattcaatggagtggacaagaatattttcttactgatcaacacatgcacaatggccaatgatgcatgggagatcctgaaaaccactcatgaccgaaccttcaaagtgaatatgtccaaatagcaactattggccacaaaaaccgaaaatctgaatatgaaggaggaacagtgtattcatgactctcacatgaacattcttgaaaatgccaatgcttgcactgccttgggagaaaggatgacagatgaaaagctggtgagaaagatcctcatatccttgcctaagagatatgacatgaaagtcactgcaattgaggaagcccataacatttgcaacatgagagtagatgaactcattggttcccttcagacctttgagctaagactctcggatatgactgaaaag

SEQ ID NO: 19971 - DNA, 395 bp, Glycine max
agcttgaatttgaacaacggaagctctcgagaaaatcgagtggtcataaattttcacacagatgtccgattcggggaaataatatatcgagacgcacgaaattgaacaacggaagctctcgagaaatatgaatggtcataacatttcactcggatgttcgatccggggacataatttatcgagacgctcgaaattgaacaaccgaagctctcgacaaattagaatggtcgtaacttttcacgcgaatgttcgattcggggacataactcatctagacgctcgaaattgaacaacggaagctctcgagaaatttgaatggtcataagttttcacacggatgtccgattcgggaacataatatatcaagacaatcgaaattgaacaacggaagctct

SEQ ID NO: 19972 - DNA, 313 bp, Glycine max
  unsure at all n locations
cccatttctaccaactacaaaacctaagaaaactatattatctacacaaaaggtacacttctctatatttgcatagagggtgtttttcctaaggactgaaagaacttgtctgagatgtcctaagtgatcatctagcctcctactatacactaaaatatcatcaaaataaacaactacaaatctacctatgaaatcccttaagacatgatgcataagcctcataaaggtgctnggtgcattagtgagcccaaaaggcatcactagccattcatacaaaccaaacttggtcttgaaagcagttntccactcatca

SEQ ID NO: 19973 - DNA, 464 bp, Glycine max
agaaggtgtgtagcccaccatcttttcatagtagaatactgtttttgcgtctactattattgtcatcattgtttttctctgtcattgaggtgctacttgagctgccaagtctctccacctttgggcgtatcctttgaaagatccgtaccctctttttgcacatgttctgtagttgcatcctatccgaagacattatactgacactgcctaatgaaggcaaccactaggtccttccaagaatggactcgggaaggttccaagttagtgtaccaggtaacagctaccccagtaagactttcttggaaggaatgtatcagtaattcctcatcttttgcgcatgcccccatcttccgataatacatctttagatagtttttggggcaagtagtccccttgtacttgtcaaagtccaacaccttgaacttgggaggggtgatgatattgggttctaggaaccaactttt

SEQ ID NO: 19974 - DNA, 461 bp, Glycine max
tcttggagtcttctatgcaatgcccttgaggggtatgattatttcattccctccccccttgaaaaggatttgatctcaaatccataggttcttgaaactcatggattctttcctcaacacctctaaaaagaataaaaacatatgtattagtgatgttgggtatgttagagtacgataaggactgaaaacccctttcttggccatcttcccatgagagaatatagttcctcaccaactcagtgagtggtgctacaagtatagaaaaatatgggataaaccttttgtaaaagtttgttaagatattgaagcccctaatttcccttatacatggtggagtaagctactcaagaatgacctttattctcttatggtccatgggaagcccttgatcactatttaaaaagttaaggaaagtaatggaataaaatataccttctttctttattttcatgttgattatt

SEQ ID NO: 19975 - DNA, 426 bp, Glycine max
tcttagtttcagatgatgcagatggatttgtagctaccttatgcactcctctaatgactatggcatcatttctggcgctaaactgttgggagttggaagccatcttctcaattaaatttctggcttcagcaggagtcatgtctccaagggctccaccactggcaacatctatcatacttctctccatattactgagtccttcataaaaatattggagaagaagctattctgaaatctgatggtgggggcaactggcacatagtttcttaaatctctcccagtactcatacaggctctctccactgagttgtctaatacctgagatatccttcccgatggttgtggtcctggaagcaggaaattttttttctaagaatactctcttaaggtcatcccagctcgtgatggaccttggagcaaggtatt

SEQ ID NO: 19976 - DNA, 417 bp, Glycine max
tgcctgatactatctgagatccctttgtcgttgccttctcttcgagggtgaagcttaaggagaacccaggctcctatctggtagttcacttcgcgacgtttcccatcagcttggcttttcatagcagcttgttccttagaagcttatttcgaatagcttggaaagtgatatccctgtcagttaacatctcttcaacggcctcaatgttcgaagaccctgtaatatattctggatagttaaaggttttcggctaaaggtaacaccatacgtagtggctccagttcccacattccatgaagtattatgggatcattcgacccacgagaggagcttcccccacaagcttggccgaggatggatgaaggctcgcaaatattgttcaattatgcgattcaaaacctctgtctgtccatcaat

SEQ ID NO: 19977 - DNA, 377 bp, Glycine max
  unsure at all n locations
gacactctcgaacactcacgcttatagaatatgtanataagagactctgactatttcttaatcattcatgtttccatggatgaaacaaatgctatttctcccagaaaggatatttttaatgatgttgctaaatccttataacgaatgcatatccttggacactattctccagggacagggagaggaagcattgaaaatcctcccgaaaaagatcatccccttgaccacattattggtgatatctcagaaggggtaacgactaaacattctctctaagatgtatgctataatatggcttttttatctaagattgaacctctaaatataaaagaagccgtattagatgagcattggatagatgctatgcttgaacaact

SEQ ID NO: 19978 - DNA, 369 bp, Glycine max
  unsure at all n locations
tatagaatatataattacataactaagaccattttagattttattcatggcaccttccgatgaggctagagtgctattttctcccacaaacgatattttanatgatgttgcagaatctttacaatgaatgcatattcatggacaatattctaaagggtaagggaaaggaagcaatgaagatcctcccgaagaagatcattcccttgacaacattattggtgatatctcaaaaggggtaacaactacacattctcttaaagatttatgcactaatatggcttttttatctatgattgaacctataaatataaatgacaccatattacatgatcattggatagctgctatgcaagaagaactaaatcactt

SEQ ID NO: 19979 - DNA, 407 bp, Glycine max
cgttgctcctctcttacacctgcagatgtaatcaagtttctcataggagattttaggttgagtaaagctcgagccagtgatctcttttgggaagctgtttggcctcgtctgttagcaaaaggctggcattctgaacagcctatagatcaagttgtttctggatcaaaacaatctttggtttttcttgtacctggtgttaagaaattttcaagaaggaaactgataaaaggtgaccactactttgattctataagtgatgttttgaataaagtagcatctgaccctgagcttcttgagactgaaagtcaagcaactgagggcagtgtagatagggaaaaaacagaagacaaaggagacctagagggtgtgccaaatagggaacaagttcattaccttcaatctcaaag

SEQ ID NO: 19980 - DNA, 389 bp, Glycine max
agcttctaaactttatacaagaattaatctctgataccacttgttagacaagtggcctcagatatcttaagaaggggggggttgaattaagatatcccaaattactttccacaattaaaaatttatttcactttcttttccggttatagattcccttaacaatgaacttcttaaatattaattcaaataaaacaatttgaatatgaatgttaagcaataataaacaaaggaggttaagggaagagaaagtgcaaactcatatttatattggttcggccacacccttgtgcctacgtccagtccccaagcaatccgctagagagttctactatcttgtaaattccttttacaagttctaaacacacaaagacaatccttccttttgtgtt

SEQ ID NO: 19981 - DNA, 445 bp, Glycine max
taacaatcagtgtcatactattgatcaaaacaaagtctgtatttatatgcaatactagactcaaaatatgcaacaaacactagacctaaatcagtgtcacagaaattggaagaaaatattttatccaagcacaaacttcaagccttattccatgtattggggggaagttatggctggccatatgggtagaggtgtcatagaggagcaggtatggaggaagggaccttggactgctgaagaggacaggttgcttgttgagtatgtcaggttgcatggtgaaggtagatggaactctgttgctaggcttgcaagtaagaaacaccaaacttttttcactgttttgtttcttaatatatatgattggattttcacatttataagtgacaatatagcaaaaaaacaactgaaattgttttcaacttctactgttcatgttggctacatt

SEQ ID NO: 19982 - DNA, 405 bp, Glycine max
agcttctaaactttatacaagaattattctctgataccacttgttagacaagtggcctcagatatcttaagaaggggggggttgaattaagatatcccaaattactttccacaattaaaaatttatttcactttcttttcaagttatagattcccttaacaatgaacttcttaaatattaattcaaataaaacaatttgaatatgaatgtaaagcaataataaacaaaggaggttaagggaagagaaagtgcaaactcagatttatattggttcggccacacccttgtgcctacgtccagtccccaagcaatccgcttgagagttctactatcttgtaaattccttttacaagttctaaacacacaaagacaatccttcctttgtgtttagaattcctttacaac

SEQ ID NO: 19983 - DNA, 298 bp, Glycine max
cagagcacctgagctgcagcttgattccttgcccgaccttttttttttatgtgcacccaaacccaaggtccgggtgagaatacaacctcctttctccctttgtcggcttgtttaacatagcttttatttttcctctcaattagatctttgactctctcatgaagcttcttcacatagtccgcctttgctagaccttctttatgcttaaaaacagaaacattaggcatatgcaaaagatcaagaggagttagtgggttaaaaccataaacaacttcaaaaggagaacaattaacggtgc

SEQ ID NO: 19984 - DNA, 264 bp, Glycine max
cctttcattctgacatcattcaagaactccttagaaccccccaagaaccacagacaaaggctatgactgaaaaagctgtgaaggttgttgaagaggtcaagttcttctcatattatgctcatcacgttgccactagtgatcatgcaggtgatatcctaaagagggtctacatgattccaaaagaaagggtacacattattctcaatggtgtgggccaacacgctttcacgccagatgtttcgaaggggaaggacttcaaaaaga

SEQ ID NO: 19985 - DNA, 444 bp, Glycine max
  unsure at all n locations
taagctccttcaactgcacaaggctcttaatatttgatgagatccttgtggaaccttcacccgacgaagacgctgactaaaacttatattatccttctttgacaaagtatggcaggatagggacaagtaaattttcttcccatcagaccttggatgcaactgtgatcgtatacccatatcagctagatcttgacgggtattcaagccatccttcgtcttgccttgaatgttaaggagcgtcccaatcacactgtcacaaacatttttctccacatgcataacatcaatacaatgtctaacgtcaagatcacaccagtacggaagatcaaagaaaatggacctcttcttccatatgcaactctgactnttatccttcttgtgggtcttcccaaatacagtattcaggtgttgaacccgctgatatacctgctcactagtcaacga

SEQ ID NO: 19986 - DNA, 227 bp, Glycine max
  unsure at all n locations
agcttgtaatcgattacacacatatctgtttcgattatcagaggagattntcagaaagatattctcaattgtcacatcttttcagttggttcttgaatggctatcaaaggcctatatttatgtgacttgagacacgaatttgctaagagtttttcagaacaaaaaggtcttatcctcttaaaaaccaaaatcattttatcctcttacaaattccttggccaaaacac

SEQ ID NO: 19987 - DNA, 285 bp, Glycine max
agcttttatgcctcagatcttcttcattattggagtctttcgcttcttgaagatcagtggtagcataatagagaaggaagatagatgattggagatgccacttcaaggagaagatgattcaagaacaagctccccaccataggaagccattgattaaagcttgtatgtacgaaaagatgagtggagggagaaaaagaaaaagagcaagaaaatttttgccctaatgaggtctaaaactttgagtggaattctgaaatggataaaagtgaaaaaaaaggcccccca

SEQ ID NO: 19988 - DNA, 313 bp, Glycine max
ggaacaacacaggggagtttcaagaaatgaagagcccccggttgatgcatggacggagatgaaaaagatcatgaggaagcggcatgtgccggctactaactcacgggacttgaaattcaagctccaaaaactaacccaacgcaactatggggttgaggagtattttaaggaaatggatgtgctcatgattcaagcaaatattgaagaaaatgaggaggtaaatacggctcgattgcttaatgggttgactaacgatatctgcgatacctgcacgagcttgttgaaaaggatgatttgcttcccaaagcactcc

SEQ ID NO: 19989 - DNA, 344 bp, Glycine max
  unsure at all n locations
aaagcccaccctaacgcatacaacaccttatcataagtagaataattaagggtaagaccacttaacttttcactaaaataagcaattggatgaccttcttgcatcaacacagccccaatcccaacatttgaagcatcacactcaatttaaaaagattttagaaagtctggcaatgcaagtatgggggcattagctagctttagcttaagaacatagaaatcttcttctagtttatctacacatctcacaccaacatttttttagcacttcattgagaggtgctgccaatgtgctataatnctacccaaatcgcctataaaaccttgctgaaccatgaaaactcc

SEQ ID NO: 19990 - DNA, 386 bp, Glycine max
aaagttattggcgggggaatttgctcagaggttcaacattcaatttcgagcgtctcgttatattacaggactcaatcagacatccgagtaaaaagttattgtcgtttgaattggctcagagcttcaacattcaatttcgagcgtctcgatatatgacaggacgcaatcagacatccgagtaaaaagttattgtcgttggaattagctcagaggttctacattcaatttcgagcgtctcattatattacaggactcaatgagacatctgactaatacgttattgtcgtttgaattggctcagaacttctacattcaattacgagcgtctcgatatatgacatgactcaatcagacatccgagtaaaagttattgtcgtatgaattcg

SEQ ID NO: 19991 - DNA, 445 bp, Glycine max
  unsure at all n locations
cgtggggcatatgtactttaagtgagagagaagatatttaaatantggaataataattaatattacgagtaaataacatatacaaagatgattaatttttacataatcaatcacatattatcatataatgtaaattgattgatagtaataataaaaatataaaattcatattaattatgatttaagttctaaacattatagatgatatgataaaaaaaatgtgtataaaaatgagaaattaagcaataatgagagaaaataaaattgaataatgaaagagagaaagagtgtgaccgtcacagcttccaatagattggtgttgtcgtgcaagtacttgaggacccatgttagaacactcgctgtggtgtcatgtgcagcaaagatgacaccaatgagattatcaacaacttgagaatctgtgtgctgctgatagtacatcttgttc

SEQ ID NO: 19992 - DNA, 355 bp, Glycine max
agctttttagaatatcaatctttataagcaaagaggaaaaatctatcatgacaaaaagttgtcaaaaaggaattttcagcttggccaacaagtattgttatttaattctagattaacattgcttccaagtaagctgaagtgcaagtggtttgaccattcttcatcaaaaaagttatgccacatggagcaatgatattggaggacccaaccaccaaaaggacatggactgtgaatggcattagaatcaaacactacttaggtggagatttcgagaggctaaccactgttgtccaactgcaagaagcttgaacccaacaaggacatccatctattaagacgttaaagaagcgctcct

SEQ ID NO: 19993 - DNA, 437 bp, Glycine max
  unsure at all n locations
tattggagggagaatattcaatccgaatcatggtacnttttgtaacgaagaatctttttgcggcttttagatgaggacaggtacgagcctccataaagcgacacacaactcccaccgcatatagaatatcgggcctcgtattggttagataccttaaactccccacaagactcttgaagaccgtggagtctaccttctctccttcatcaaactttgataacttcaagccaccttccataggtgtgttcacgggattgcaatcaagcatattaaatttcttcaacacttcttttgtgtagcttccttgtgagacaaagatcccattctccgtttgcttcacttccattcccaagtaatatgacatgagtcccatatctgtcatatcaaattcacgagacatggactccttgaagtcttcaaacaaatttgggttattg

SEQ ID NO: 19994 - DNA, 443 bp, Glycine max
  unsure at all n locations
gagcatatgcaaacgacaatcacttttttacttggatgtcatantgagtctcgtaatatgtcgagacgcgtcgaaattgaagaccgatgccctgagcaaattcgaacgacaataactttttactcggatgtctgactgagtcccgtaatatatcaagacgctcgaaattgattatcgaagctctgagcaaattcaaacgacaataactttttacttggatgtctgattgagtcccgtaatatatcgagatgctcgaaatggaataccgaagctctgagcaaattcaaacgacaataattttttactcgtatgttcgattgagtcccgtaatatatcgaaacgctcgaaattgaatgtcgaaactctgagcaaattcaaacgacaacaactatttactcggatgtatgattgagtcatggaatatatcgagatgctagaaattg

SEQ ID NO: 19995 - DNA, 201 bp, Glycine max
agctttgtatttccttttagtagggaatctttccttcctaagatggagccaaacctagtccccctcattaagaactagctcatttcttcctctattgcccttagttgaatacacctttgtttggttctctatttgggtcttaaccctctcatgcaacttctttacaaactctgacctagattccccttctttatgtataaa

SEQ ID NO: 19996 - DNA, 438 bp, Glycine max
  unsure at all n locations
aattagggatcatagttatgaacaaggccatattgaatcntaaggatacaaccaagaggaaggcatggactattatgagacctatgcccctgttgctaggttggaagctattatattgttgcttccttttgcttgtataataaatttcaggttatatcaaatggatgtaaaagtgtttttctcaatggatatattgaagaaaagatatacgtggagcaacctctaggttttgtagacttcgatcatcctaatcatgtttacaagttgaaaaaggcactatatggattaaaacaagcacctagatcttagaattctctagttctatccagaaagagttggagatgtctatgatgagagaattgactntcttccttggacttcaagttaagaaaatcaagcatggaacctttntatgccaagcaaagtactacacataat

SEQ ID NO: 19997 - DNA, 271 bp, Glycine max
gcacaagggccaccgaaggggggtagatcctgagaaccactcatgactgaccctccaaagtgaagatgcccagattgcaactatgggccacaaaattcgaaaagctgaagatgaaggaggaaaagtgtattcatgacttccacatgaacattactgaaattgccaatgcttgcactgccttgggagaaaggatgacagatgaaatgctggtgagaaagagcctcagatcctcgcctaagagaattgacatgaaagtcactgcaatcgagga

SEQ ID NO: 19998 - DNA, 348 bp, Glycine max
agctgtctcctttttctcattttatgcataacatgcaagttcatattttaatttaacgtttactaacaagactaaaatccgtaataagatgaaaaataaattctcaatttaatacttattagtgtatatttaaaagaaagctgccaaaaattagtaattattgattatcattgggacatgtaagaaagacattatgtgtgctttttttactgagacaatgttatttgttttaatagactaataatgtaatttaacatattgaaacatcaaattataaatattctgtacaaaattaatggtatatacgtgttggatgtatctattcagcataaaaaggttcttggatgt

SEQ ID NO: 19999 - DNA, 168 bp, Glycine max
  unsure at all n locations
agcnttttatatatcgaggcgctcgaaattgaacaacggtaagtcttgagaaattcaaatggtcataacttttaactcggatgtccaattcatgcgcatcacatatagagacgctaaaaaatgaacaacggaagctctccagaagttaaaatggtcataagttttcac

SEQ ID NO: 20000 - DNA, 422 bp, Glycine max
cgagtttcacgccgagtttttacatcgagtttctccggtctgacgacggcgtggcggtgatgagtctggagctcacacctgcatgtaaaagtctggttgctctggctccggcgatgaacctcttcgtccatgcgagcgaatctgttctccatcgtcagtttccactccaaattctcgcgcgcgctgtccaattcttcattcacgatctcgtgtagccgctccttgcacatagtcgcaaccttggaaacgaaaacgatacaacttctctaagtctcatgccctcgacggcggacttggagaccggtggggcgccgtaacggatacgattgtactcggcgaggtgctcctcgagaccctccccgtagaagtaatacccgtgggtgactctcgggaagctgtacgttctctcgagtcccctattc

SEQ ID NO: 20001 - DNA, 416 bp, Glycine max
  unsure at all n locations
agcttggactttctgtgttctgggaacctctccttcctcaggtgtacccaaacccaatcacctggttcaagcacgactttctttttgcttttgttggcttgccttgcatagctcacatttttcttttcaatttgagccttcacttgctcatgcaacttcttcacatactcagctntagcctgtgcatcattatgcttaaacatagcaatgttaggcataggcaacaaatcaagaggagtcaaaggattaaatccatatactatctcaaatggtgaacaattagttgtgctatggacagctcgattataagcaaactcaacatgaggcatacaggctgtccaagatttaagattnttctntaatacagtcctaagcagtgttcctaaagtcctattgactacactcagttgaccatc

SEQ ID NO: 20002 - DNA, 371 bp, Glycine max
  unsure at all n locations
agcttgtcattggacaatatggactctatagcatcctgaatgtgactctctgcgtccaacagattctccttgcaatcagccaaaccctgttgaaccttaggttccaaattctggtcgtcgatcattctcttacaatcatttagaatgctgctcgcatttgacgccgcagccttcagagatatcattgccagctcctctaggtccgcgtgatcactgtctgggtccgaggaaagcacctgcatgcacaattcattgtttcccctgtttttgcatatgctcttaattagctccttgcctaatttttcttccgccgcaccgcttcngtgatgtgctagaaccaaccacatgcatatgcccatcacccacaacaa

SEQ ID NO: 20003 - DNA, 392 bp, Glycine max
  unsure at all n locations
atttntatatgattggctaagatnncgttaaaacataagcacttagacaatgaaggaaagctggagttgctgcacatgatgtccaacgttatgtcaaagaataagatcgggctgcacaatgcacaaggcaagataaagtgtcaaatgaagaattgaagctgcaggattcacgatgtcggatacaatgtccaggacatcctgcccgaaaatactggagttgctgaaagcattgaagttgcaagatccacgatgtctgacacgatgtcctgacatccggcccgaatatactggacatataaatctgttatatctntaacagattattgtgcagttagcaagagataagatgatctatctttaggaacgaattaagagataattatagttcgaat

SEQ ID NO: 20004 - DNA, 422 bp, Glycine max
  unsure at all n locations
tgtctntaagtatcaagattcaagaatcaagagaagactctatcaagataagtactaaaaaagtttttcaaaatattgagtagcacaagaatttttcacaaaatcttttaccaaagagttttactctctggtaatcgattactagaaggtagtaatcgattaccagtagccagcattgttttcaaaactgatttacaaagttgtaatcgattaccataatcatgtaatcgattaccaatgttttaaaatgttagatttcaaatttcaagagtcataactaatgataaaacattttcaaatcattttaaacttgtgtaatcgattacacaatacttgtaatcgattacccgtgtntctaaacattnntgatttcgatntaaacatgaagagcacatctttgatgtgaatcgataccatgactg

SEQ ID NO: 20005 - DNA, 410 bp, Glycine max
  unsure at all n locations
ctgaggganaacttgatgccttggtcaacctagtatttatcttgccttgaatcagaaatatgcacctgttgcaagagtctgtggtctatgttcttctgcagatcaccatacagatctttgtccttctttgcagcaatttggagtcaatgagcaacctgaagcttatgttgcaaacatttataatagacttcctcagcagcaaaaccaacaaccgcaaaataattatgacctttcaagcaacagatacaatctaggttggaggaatcacccaaatcttagatggacaagtcctccacaacaacatcagcctgtccctcatttncagaatgttgttggtccaagcaagccatatgttcctcctccaatgcaacagcaacaacagcagtcacaacaaagacaacaagcaaccg

SEQ ID NO: 20006 - DNA, 378 bp, Glycine max
  unsure at all n locations
agcttatacttatattgatgatcatagnntgagaatcatacactccatgtcccttatatgtgcaattgacttaagcataccagacatcatacacaagtatggccaacccatgccactctcacaactcattgcttcactaccaatccacccatccaagacttgctacatccatcgcttgatgcgactctttactcattccggtttcttctctcggcacgatttggtcgaaaacgaacaagaagtgatcacgtatgagctaactgatgcatctagactactcctcaaggaccacccttttagtttgaggcctttgttgctagtcacacttgatccaagtgtgattaagtcatggtgtcaattctctacttggctcacaag

SEQ ID NO: 20007 - DNA, 411 bp, Glycine max
  unsure at all n locations
ttcttatgtacttgagagttntatcatttcgtgacttccgaagtttggattctttgcctgattcaataggtaaattgatccatctgcgctatttagatctctctcattcaagtgtagaaacactgccaaagtcattgtgtaatttatacaatctgcaaactttgaagttgtgtggttgcatcaaactgactaagttgcctagtgacatgtgcaatcttgttaacttgcgtcatcttggtattgctgatgctcctataaaagagatgccgagaggaatgagtaaattaaatcatttacaacgtctggatctctttgttgtgggcaagcacgaacagaatgggatcaaagaattgggaggactctccaatcttcgtggtcaacttgaaattatgaacttggagattgtctccc

SEQ ID NO: 20008 - DNA, 435 bp, Glycine max
  unsure at all n locations
tgtatgtgttacaatgttcttaaatttctatttagtttttaagaacaacctgtctaggtaatttttttcagaaagacttttaacaaaataagaaaagaaaagtttttcataattaccttatacacaacctaatgatagaagctctttcatattagtttttttcaaaagatatttttaaattatgtataaactaacattaacttatagataagtntatttaattttttttctttctattttccttttttactagtacttctaaatacatttatccaaatagacccttaatattaatatatatcaacaatacttacatccaaatgatcacttaatcaagacttgaaattattttatataaaataaccagattaattaaccaattacgtgcttgggtttcatttctaacatcaatattagtaattatttagaacattt

SEQ ID NO: 20009 - DNA, 378 bp, Glycine max
  unsure at all n locations
agctngagctgggaattttgatncatggatnnctcaagaagaagatagatagtgacatgtttgtatggtctgcattgattgaatagtattcaaagtgtggacaaatgaatgatgctgtgatagtgttaacagagtatccaaaaccagacgtggtcttatggacttcaataattactgggtatgagcagaatggaaatgctgaacttgcacatgcncatttctcccgaatggatgtgtttgagctagtaagtactgatccacgaacacttgttaatgctgcttctgcttgtgacgcagtatctgattctaaccttggaagaagtgaacatggaattgtcaaacgaaagggttttatactaagtatgtttggcaattcta

SEQ ID NO: 20010 - DNA, 441 bp, Glycine max
  unsure at all n locations
gcctcattaaactatatatttcccgaagggtttttttttataagcctcctatttttaatggcgtgggttaccattattggaaaccccgcatgcaaatttttatagaagcaatagatctaaatatctgggaagccatagaaattcggccctacattcccactatggtggaagcaaatacaaccatagaaaaaactatgaaagaatggagtgaagatgacaagaaattagttcaatacaatntaaaagccaaaaatataattacatctgctttagggatggatgagtacattagggtatcaaattgtaaaagtgaaaaagatatgtgggataccctacacgtaacacatgaaggtacaacaaatgtaaaaagatctgggataaatacattgactcatgaatatgnaatatttagaatgaatcccaatgaaagcatatatgata

SEQ ID NO: 20011 - DNA, 414 bp, Glycine max
  unsure at all n locations
agcttgtgcatccaatactcctgatgaggatgtcccatatgctcttaaaactggactgatccatttgcttcgaaagtntcatggccttgcaggtgaagacccgcaaaaacatctaaaagaattccatattgtctgatccaccatgaaacccctagatgtccaggaggatcacatatttctgaaggattttcctcattctttagagggagtggcaaaggactggctatattaccttgctccaaggtccatcacgagctgggatgacctcaagagagtattcttagaataaattttccctgcttctatgaccacaaccatcagaaaagatatttcaagaattaggcaactcagtggagagagcttatatgaatactgggagagattcaagaaactatgtgccagttgccctcacca

SEQ ID NO: 20012 - DNA, 419 bp, Glycine max
  unsure at all n locations
acccgggatccttaagtcgcctgcagcatgcaattttggtttatanagacaccgtctcgtagtcatatgagagattttggttgtacaacatatgcattagtagatataaggactaagctggatgataaatttgtcaaatgtgtatttattggctatgctacttagtcaaaggcatacagactgtataacccactaactggcaagataattgtcaatagaaatgttgtatttgatgaagatgcaagctgggttcgggaggaatgtgaaatcagtaacagtgtttagcagaaatcagtcagttttgatggttcataagaggtctcaaatgtgccagactatgatcacactccaagccctcattcaacgccatcaagccagtgatcattagctccttcaagccatggatcatctagctcatc

SEQ ID NO: 20013 - DNA, 474 bp, Glycine max
  unsure at all n locations
actcaagcttatcacacaaaggtgttgctttgtgtggaggaaccattntctttggttttctctctgactttnacaataagtatgtggtcaagaaacaccacttgagtcatgacacccgttccagtggagacaataattgaggttccaagggtgttagacatcatggttgcatggtaggcaaacatctcactcatgtggttcttcaacacttgaccaatgttaggtggcattttaccacttggtatagtggcttttgtttgcaatgctactatgtgccttacttgcacaacttttagtgggaacttttcataagctgtttctctagacaacattattccgttagaaccttcttgaacaacaattactaaatatgatacctctattctggttagagtcgggtgaacaatcatgttgtctagcatatgtgatgccacaataacagtcttttccatgcttagacacaagtttattatc

SEQ ID NO: 20014 - DNA, 460 bp, Glycine max
  unsure at all n locations
tagtcaagctaagcactaacaatctcccnctttggttaatttgtctaaatcatacttagacacttcctgagcaggtacgagcagttatgcaagtgggatcagcaacttccattatcagagtaatcaagcacagcggaatctgtagtttagacaagttgcaaatcgtttccaggatgtcaagacatctcacatgacatctgctttctgcttctgctccccctgtctccatgcttactgcagcatcttctaacagctactagtcttttccaggatgtcgagacatctcatgtgacatcagctttttgctccccctgtcttcatgctcttactgcagcatcttctatcagctactagtagcttacatcagtcatcaacagcagcagtctccccctcaaaatcatgaatcatgcatacatcgnatcctacttctcanaatcatacatcatgcataatgctacta

SEQ ID NO: 20015 - DNA, 375 bp, Glycine max
  unsure at all n locations
aactcggatgtccgattcaggcgcataatatattgagacttttgatattgaataacagaagctctcgagagattcgaatggtcataacttttcacacggatgtccgattcgggcgcataatatgtcgagacgctcganattgaacaacggaagctctcgagaaattccaatggtcataacttttcactcggaggaccgattcaggcgcataatatatcgagacgctcgaaattgaacaacggaagctctcgagaaattcaaatggtcataacttttaactcagaggtccgattcaggcgcataatatatcgagacgctcgaaattgaacatcgaaagctctctagaaattcaaatggtcataacttttcacttgg

SEQ ID NO: 20016 - DNA, 370 bp, Glycine max
  unsure at all n locations
tgtctttaattccaagttaaatggtattatggagtaaaatatacctttcgaagttgatcaaatccattaagttgattaagcagctccattagcgttctctgaatttcacgatctgcacttgttccctcattgaaacgacgacctccaatggcatcaatctcatccataaaaatgatgcacgactaatcaagaaaagtatagatttagaacatgtntaaattagtatgtgtaaacctataggaagacaatttcgcacaagtacctcacctggtgatcacgtgcataaccaaacatctctctcattaacttggcattttctccaatgtacttgtcaattatggcactggccgaaacaacctacatcagaata

SEQ ID NO: 20017 - DNA, 421 bp, Glycine max
  unsure at all n locations
tattacttntagaccaaatagaaactatattctcatgtaatttatagaatgactntatngaaaagatgcttataatgtgatcgtattangataaagatgtattcangtcattggctaaaatttttatacataggttaaaatgtaattctgatttctttatttttataaatccatgattttagtttccatcttttaaaattgagatatttagtccttcaattttctaagattcttaattttggtcaattcattcatttgagatggttaattgttaattgattaacgttgatcatttatctggttttttattctcatttttttattaccgagtaaaagaattttaaaaaaaaaatatttgacgatattggtccnctgtctacctggtgagaatcccaaagctgcccaaatatanggatctatg

SEQ ID NO: 20018 - DNA, 206 bp, Glycine max
  unsure at all n locations
atgaattgcgttttcgttcatgtgtcctccaccctcgagttcggagctatgcgtagtgattgcttagtgcaattctccattctcaaactttttcggagccccatgaattatgtnntcgttcatgtgtcctccaccttcgagttaggagctatgcgtagtgattggcttaggcaattctccattctcaacctttttcggagcccatg

SEQ ID NO: 20019 - DNA, 429 bp, Glycine max
  unsure at all n locations
gccttcanagcccaccaccaacatctatgccagatanattgttaatatataagtnggaaagctgtggatttgaaagcattctggtgtaagtgatgggattagcgttcttganaactgaagactcattacccataactaatgacccagaagaaccagcttctgttgttggtaagcagtatgagacaactcctccaaatgtggcattagtttgagataccaatgagaggtaacttcttcccaaccccataaggccagagactcctccaaatagacctttgttgttcctaccgacaccaaatacaaaatcactcactgaaacacctccaagactaagtgcttcaacacctagctcaccattagtgtaagatccatcaccatagttaaccacatagttacaagttgatggattactacttccacaggctcctg

SEQ ID NO: 20020 - DNA, 431 bp, Glycine max
  unsure at all n locations
agcttcaacttcagaccatttcncaggtgctggaactacttcacatggacttgatggggcctatgcaagttgaaagccttggaggaaagaggtatgcctatgttgttgtggatgatttctccagatctacctgtgtcaactttatcagagagaaatcatacacctttgaagtattcaaggagttgagcctaagacttcaaagagaataagactgtgtcatcaagagaatcatgagtgaccatggcacagagtttgaagactgcacgtntactgaattctgcacatctgaaggcatcactcatgagttctctgcagccattacaccacaacagaatggcatagttgagacgacaaacatgactttgcaagaagttgctatggtcatgcttcatgccaaagaacttccctataatctctgtgctgaagccatg

SEQ ID NO: 20021 - DNA, 449 bp, Glycine max
  unsure at all n locations
ntacacattgtgttgngtattattgattcctacgattgttaattattacttcnatncnnaccttaaattattactttcacgaattntgattatatttctgagaaaattttcctagaaatgttattattaaaatattatttgaatattattctcataaaaaatgtttggtaaatatttttaagtttattttaatttaaaaaaaatattaaatagataaataaatgagatagaataagaggaaagtggaaaattattttaaataatttcatgtgaatataagatttccacccttatacatgagaataagaaaagatggaaaaatatatgtacaatggatntgtgagaatgaattaaccaataactttcttgttatntcaattttatttaaattatcttacattctacaagatattttcaaaaataacatttctaatcaataaatttctaac

SEQ ID NO: 20022 - DNA, 412 bp, Glycine max
  unsure at all n locations
tgtagggttaaagtctcacgattggcacgttctcatgcaacatttgtnagncgaggctatacgagacatcttgccaaacaaagtcaggttagcgataactcgcatgtgctttttcttccatgctatatgtagcaaagtcattgatccagtcaagtttgatgagttggaaaataaggccccaattatactgtaccagttggagatgtattttccctgctttctttgacatcatgattcacttgattgcgcatctggtcagagaaatcaaatgatgtggtcctgtttatctacggtggatgtacccggttgagtgatacatgaagatcttaacagggtatacaaagaatctatatcgtccagtcgcatctattgttgagaggtacattgcaaaggaaagccattgattttgttc

SEQ ID NO: 20023 - DNA, 352 bp, Glycine max
  unsure at all n locations
actcaagctttgcatggtgtctgaaatgtaatgatgtcattattncctttggatttaatgttaatatcgcagatgggcgtacatatctaaagatcagtgggagtaaggttatttttctaattctgtaagtcggtgatatcttgtntacaactaatgatcttggtcttcttcatgaggcaataagtatttctctagacactgtgaaatgaaagatatgggtgagacaagctatgtgataaggatagaaatattctgaaataaatcataaggattgttaagcttgtcttagagaacatatatcaataaagtactagagagatttaggatggaagagtgctcatcatcacccgtt

SEQ ID NO: 20024 - DNA, 434 bp, Glycine max
  unsure at all n locations
agcttaagcttcttcaattgcacaaggctcttaatatttaaagagtatccttgtggaaccttaacccaacgaagacactgacaaaaacttatgttctcctttntggacaaagtatgataagctgggggcaagtaaatnttcttcccatcagaccttggatgcaattgtgatcgtatccccatctcagctagatcttgacgggtattcaacccatccttcgtcttgccttgaatgttaaggagcatcccaatcacactgtcacatacatttttctccacatgcataacatcaatacaatgtctaacgtctagatcagaccagtacggaagatcatagaanatggacctcttcttccatatgcaagtcttactgttatcccttctttgggtctttccaaatatagtattcaggtgctgaacccgtattatacctgc

SEQ ID NO: 20025 - DNA, 444 bp, Glycine max
  unsure at all n locations
ctatcaaccgctgcttaactccttaactgcacaagctctgaaatatttatattttcttgaggaaccttcacctgacgaagacactgacaaaaacttatcttctccttcttggacaaagtatggcaggctgggggcaagtaaattttcttcccatcagaccttggatgcaactgtgctcttatacccatatcagctagatcttgacgggtattcaagccatccttcgtcttgccttgaatgttaaggagcgtcccaataacactgtcacaaacattnttctccacatgcataacatcaatacaatgtctaacgtcaagatcacaccagtacggaagatcanagaaaatggacctcttctttcatatgcaactctgacttttatactttctttgggtcttccaaatacagtgttcatgtgttgaacccgtgatatacctgctcacc

SEQ ID NO: 20026 - DNA, 377 bp, Glycine max
  unsure at all n locations
agctnngnttcagatattcttcgngganngctgcatnctcgtcccttgtcgcatgattgccaaaatccaataactctgccactggattatgtgcttcttttggacaatttgtggaccaaacaaccgtgttgttgtgtgtcatgaccaaattgccagaactgtacagtctcaagatggcagaggaatcatttattgggttgccaccgtttgcaacccatacaacatgttgtgacngattattcttgaaccaaatccccaggtaacttttgtttggaagtccaagattgaagaaaccaagctcaaagattccccttgtggaaaccatggtctttccaaaacttgaggattgggactgtgatatggatgatgtgttgtct

SEQ ID NO: 20027 - DNA, 398 bp, Glycine max
gacctatagatactcaagcttgtgcgcatttgcgatagtgatgttgccggagatgtttatgttatattatgtaccaccggattcgtattccttatgggtgatagtgtttttacatggagttctaagaagcaaggcattgtgacactttctacttgtgaagccgagtatgtagctgcaacttcttgcacatgtcatgccatttggctaacaagattgttggaggaacttcacttgttgcataacgaaagcacacagatctatgtagataatagatctgcacaagagcttgccaagaatccggtgttccatgcacgatgtatgcatatagatacaaggtatcatttcattagagagtgcattaccgataaagaactataattgactcatgtgacaactca

SEQ ID NO: 20028 - DNA, 423 bp, Glycine max
  unsure at all n locations
taagctccttcaactgcacaaggctcttaatattttattagtatccttgtggaaccttcacccgacgaagacactgacaaaaacttatcttctcctttttggacaaagtatggcaggctgggggcaagtaaattttcttcccatcagaccttggatgcaattgtgatcgtgtgcccatatcagctagatcttgacgggtattcaagccgtccttcgtcttgccttaaatgttaaggagcgttccaatcacactgtcacaaacattnttctccacatgcataacatcaatacaatgtctaacgtcaagatcagaccagtacggaagatcaaagaaaatgaacctcttcttccatatgcaactcttacttttatccttcttttgaggtcttccaaatacagtattcaagtgtaaacccgctcata

SEQ ID NO: 20029 - DNA, 418 bp, Glycine max
  unsure at all n locations
tgcttcttatttgatccagtagaggaggagcatacaacctatttcactcaagtcacacccaggaactctggcacaagagacttggtcattgccatcttgaaagaatgctaaacatgaaaaaaaggaaatatgcaaaagaaaatttgaagaagtttcaaatggaggaatacaaatctgttagcacaccaatgaatcaaaatgacaagtttagcaaggaagaaggtgttgataacattgatgaaggatattataggagcttgattggatgtctaatgtatctcactacaacaaggccaaacattctatttgctcaaaagaacaaaactggaattnttgttgacaatcaagtagccattgctattgcaaacaattccatgtgtcatgggaagactaaacatttcaacatcaagttctatta

SEQ ID NO: 20030 - DNA, 226 bp, Glycine max
  unsure at all n locations
tcgatatattacgcgactcaatcagacatcagagtaaaaagttattgtcgtttgaatntgcaacgaccatcaacattcaatttcgagcgtgtcgatatattacgcgactcaatcagacatcagagtaaaaagttattgtcgtttgaatttgcaacgaccatcaacattcaatttcgagcgtctcgatatatgtcgcgactcaatcagacatccgagttaaaagtta

SEQ ID NO: 20031 - DNA, 355 bp, Glycine max
  unsure at all n locations
agctntagttttacccttgcagaattatctaagagctgcttagattgtggcctcaaccagtcaatgaacatattcagctgtatgggctcagagaatccatgagtaggaagttttcgcagcaagctacaaaatctttctagggctttactcanagatntatctgggaactggtgaaaggaagagatgacagcctttccctctgcagtcttggactctgaganatatttcttcagaaacttttccacaacttcatcccaagtcctcaagctattacctttgaatgaatgtagccacctcttggcttctccagatagtgaaaatgaaaataagttgatcctaacaacatcttctggca

SEQ ID NO: 20032 - DNA, 351 bp, Glycine max
  unsure at all n locations
gcattccctatatgttctagaatncagttagtagttttcttaaagcattacacactatatattgcgtacaacaaatatgcaatttgatccaacgtgtataccatcttggatggtaaaagtaggtaccttctggaggttggacaagcttccggttatgaggagcggccatttccttcttcaactgtgtcagtatgtcctccatggtgtactctctttgccaatttgcaagaagaccaaatttctttggttcaacctatttcattcaagtctataaatcttgtcacaaagataattagttattaagccaataaaatagactaaattgtctcataatcatacacatgagaagtg

SEQ ID NO: 20033 - DNA, 455 bp, Glycine max
  unsure at all n locations
tctgaggaggtgtctcaggactgcgcggcttatcgctgtagttgtgctttccaaggttgtgctttcggcatggttgatgtttgagaggagggaggatgagcttgagggtgtgtcttctatggattgtggtggttgtgttcttgaatgtccgaaggtgaatttggtgaagggctctagtccttgttcaatcaatgataggtgccagtgtccacaagggactaaagaggaaactagcaatgaagaaagtgtgtttttgtgtttgccagatgaggaacaaaaggatgtttctttctgcattgcgagtgaggaaattgattgtgttaagtggagaattgctgccctttctgacccttttaaggcaatgctttatggtggctntgctgactccaagatgaggaagattgatntcagcanaaatggtataagctcacagggtatgacggcagtggagttgt

SEQ ID NO: 20034 - DNA, 398 bp, Glycine max
  unsure at all n locations
ctcagctggacaaggaaggaaatttntctaccatctactatgttactatgtttaaatgagcacagatgattatgctaccacaganaaagaaatgttggcaattgtctatgcacttgaaaagtttaaatcttatttggtaggctcaagagttatcatctacactgatcatgcagctattaaatacttgctcaacaaggctaattccaaaccaagattgataagatggatnnttttgttgcaagaatttgatttggtgattcgcgataaaaagggatcagagaatgttgtagctgatcatctgtcaagattagtgaatgaggaagttacagcanaagaagttgaagtgagagatcaattccctgatgaatcacntattttaataagtgaaagaccctggt

SEQ ID NO: 20035 - DNA, 370 bp, Glycine max
  unsure at all n locations
agctnggatctcatntctcatnccttatcaacnncncanngctatgagtcagtgtagttaggggtagtgccaatttagaaaatccctcattgaatttgctataatagccagccaaccccaagaaactttgaacttctgttggagttgtcggttgttgccactccttaaccgactccactttaattggatccacagcaaccccatctttagaaatcacgtgccctaagaactgcactttctctaaccaaaattcacatttcgacaatttggcgaacaatttcctatccctcangatatgcaacacatttctcaagtgcttgtcatgctcctncttattccttgaatacactatgatatcatcaatgaacac

SEQ ID NO: 20036 - DNA, 388 bp, Glycine max
  unsure at all n locations
catccaataccctgatgaggatgtcccatatgttcttattattattattggtccattngcttccaaagtgtcatggccttgcangtgaagacccgcacaaacatctaanagaattccatattgtctgctccaccatganaccaccagatgtccaggaggatcacatatttctgaaggcctttccttattctttagagggagtggcaaaagactggctatattaccttgctccaaggtccatcacgagcttggatgacctcaagagagtattattagaaaaaattttccctacttccaggaccacagccatcagaaaggatatttcatgcattatgcaactaagtggagagagcctatatgaatactgngagaatatttaaaaactatg

SEQ ID NO: 20037 - DNA, 393 bp, Glycine max
  unsure at all n locations
gctggctattataganagttcattgaagggattttctatattggcattgcccctaactaagtggactcgtaagaatgagaagttcttctggaatgagaagtgtgatcaaagtttccaagagttgaagaggcggttgacgacagctccagtgttaattttgcccgaccctaagagaacattcgaagtgtattgcgatgcaagcgggcaaggcttggggtgtgtgttgatgcaagagggaagagtagtggcttatgcttcgcgtcaattacgtcctcatgaatntaactatccgactcatgacttggaactagcagcggtggtctttgccttaaagatttggaggcattatttgtacggtacttcgtttgaagtttcagtgatcacaagagtctc

SEQ ID NO: 20038 - DNA, 426 bp, Glycine max
  unsure at all n locations
agtcgntgcaacatgatcatacattcatggattgngatttattatcacactcaatcggccagagcatagtgtttttgganaatgtcgctgatgttcggaatgatttgaacgagagattctctcaaggagaccttatcagaatttctgaacttcaacaagagatatatggcctcaggcaaggttccttctctgtcactgaattttattctgagttaaaaatactttgggaagaactttaaacatatatgcgtattccatgttgttcctgtaccattaaatgcacctgtgctgcaatgagaaatgccagacattntcatactcttaattatgctataagaattttgactggttngaatgacaatttttcagtagtgaaatctcagatcctnactatggatccactgcctagtatgaacacaatttttc

SEQ ID NO: 20039 - DNA, 429 bp, Glycine max
  unsure at all n locations
agcttaaatttgcggttgtatgacttanagtactaacagagcattttagaggggtnntacttntnnntgtttgaaaaacttacataattagcataaatatttttgaaacaatttttaattaaaaaaaccgtctttcataaaacacacaaacagtaggcactaaaaccttcccaaatgctaagacaacaaaggctacattacaaacaaggtccagtctagagcaacacattcacttgaagcaagttccaaagtacctcattagaacagaagcagcgataaacatgaccggattggtgtaggttctccgcatattgtttgtataaagaattcctctcagactgcctataatgaccataatcccctccaacaccangccctaacanattcatcacaacccacaaaaatacacacttaaccataaacaaaaat

SEQ ID NO: 20040 - DNA, 343 bp, Glycine max
  unsure at all n locations
agcttaaactttcatttctagcgtttcgnnatataacggggactcaatcatacatccgagtaaaaagttatcgtcgtatgaattggcttaaagcttaaacattcaaatttgagcgtctcgttatattacaggactcaatcagacatccgagtaaaaagttattgttctttgaattggctcagaggttcaacattcaattttgagcgtctcgatatattacgggactcaatcagacatccgagtaaaaagttattgtcgtttgaattggctcagagcttcaacattcaatttcgagcgtctcaatatattacgggactcaatcagacatccgagtaaaaagtta

SEQ ID NO: 20041 - DNA, 436 bp, Glycine max
  unsure at all n locations
agatactcagcttgagccattctaanataataacttntactcggatgtctttattgattcccgtaatatatcgacacgctcgaaattgaatgttgaagctctgagccaattcanacaacaataactttttactcggatgtccgattcagtgacgtaatatatcgggacgctcaaaattgaatgttgaacctctgagccaattcaaacgacaataactntttactcggatgtctgattgagtcccgtaatatatcgagacgctcgaaattgaatgtggaacctctgagccaattcaaacggcaataactttttactcggatgtctgattgagtcccgtaatatatcgagacgctcaaagttgaatgttgaagctctaagccaattcatacgacaataactttttactcggatgtctgattgagtcccgaatataacg

SEQ ID NO: 20042 - DNA, 273 bp, Glycine max
  unsure at all n locations
acatctatcctgtgtttcagatattngaacgggctatccgcaacaaataaatacgtaacaagtcaattcaagaaattgggagaagagatcctgtctcaatttaactagttcatgtcaatttgattgctaaccttcattgaagttaacttgttcaatgcttccagctacaccataaccctggattacattcacatcttttacaaactgaggtgagagctttggaagcaaatttctggagtctacaatcacagccttgaacatgcgtgatggggc

SEQ ID NO: 20043 - DNA, 451 bp, Glycine max
  unsure at all n locations
tgaagatgttgtgctcanagtctctggatgatacncttcntttagactttggagtaaaccttggttctaagatgtggcaacataagtgttatcaatctaacaaaaaatcctatcatgcattctacgactaaacacatagaaataatgcatcattttcttagagatcatgtgttaaaaggtgactgctacattgagttcatagatagtgagcattaacttgcagacattttcactanaccacttgctagagataggttctttntcattacaaatgatataggcatattagatgcatccaacataaaataacttcctatttgcataatgtgtgatgcacatngctatttgagacgatgactaatttattctggagtctctactttaatcaatcaccaagtagtttaatcgattacttctctctcgctaaagtgtcagaagtaacaagacactt

SEQ ID NO: 20044 - DNA, 327 bp, Glycine max
tttcttcacttatgtttgtatggctagaaacaagcacctaggcagtggtacaagaagtttaatgagtttatgagcaactcaagattcaaaagatgtgacatgggccattgctgctatgttaaaaaatatactaatagttatgttatccttgttgcgtatgtcgatgacatgttgattgcaggatctattatgatagaaattaatatgttgaatcagcagttggcagaaaactttgaaatgaaggatcttgctcccgctaaacaaaatcttggtatgagaattcttacatacagatcataatggaattttgagctgtctgaagagaaa

SEQ ID NO: 20045 - DNA, 449 bp, Glycine max
  unsure at all n locations
agcttcaagattcaatntctagcgtctcgatatgttacgggactcaatcagacatccgagaaaaaagttattgtcatttgaatntgctcagaggttcaacattcaatttcgagcgtctcgatatgttacgggactcaatcagacatccgagtaaaaagttatggtcgtttgtattggctcacagcttcaacattcaatttcgagcgtctcgatatgttacgggactcaatcagacatccgagtaaaaagttatggtcgtttgtattggctcagagctgcaactttcaatttcaagcgtctcgatatgttacgggactcaatcagacatccgagaaaaaattattgtcgtttgattggctcagagcttcacattcaatttcgtgcgtctcgatatgttacgggactcaatcagacatccgagattaaaagtattgtcgtttgaactgctc

SEQ ID NO: 20046 - DNA, 157 bp, Glycine max
ttcttccttattatgagcacctaacggactactgggagaaagtatgaccatctgaatctctcgagagcttccattgatcaattttaagcttctaaatatattatgcacctgaatgatacttgagactgaaaagttatgacccttggaatttctcgag

SEQ ID NO: 20047 - DNA, 351 bp, Glycine max
  unsure at all n locations
tagctngtatcttatgcaaacggcaataacgttgtactcggatgttcgattgagtcacgtaatacatcgaaacgctcgaaattgagaacagaagctctgtgcatattcaaacgacaatacattttaactcggatgtccgattgagtcccgtaatatatcaagacactcgaaattgagaataatagctctgaacaaattcgaacgacaataactttttactcggatgtccgagtgagtccagtaatatatctagacactcgaaattgagaatagaagagctgagcaaattcaaacgactataactttgtactcggatgttcgatggagtcccgagcgtctcgatatattatg

SEQ ID NO: 20048 - DNA, 380 bp, Glycine max
  unsure at all n locations
agcttccattatgagctctagtttcttggtcctccaccaaggaaccagtagtaacattgtcatcctatgaagctgagtatattgcagcctcagaagctgcatgccaagcagtgtggctagatgccccgatgaagaaattgcaactgganaaatcatgtaaagtgaagttgttggtagacaataaatcttccattgatttagctaggcatccgacttctcatggaagaagtaaacacatagaaacaaagttccacttcctaagaatgtcagcaatgagaaactgaagattgacattgcagaactgaaattcagcttgaaacatactcactaagactttgaagctagaaatgtntagatgtttaagagattccattggaatt

SEQ ID NO: 20049 - DNA, 438 bp, Glycine max
  unsure at all n locations
agcttgaatgtgcgtaccccaccattttttcatagaaaaacactggtaatgtgtctactattactatgatcatctctttctccgtcattaagggtgccatatgggctgccaggtctctccacctttgggcatattctttgaaagattcatgccccctcttgcatatgctctgtagttgcatcctatccggagccatatcagaattgtaccgatactgcctaacgaaggcacccattaggtccttccaagaatggactcangaaggttccaagttagtataccangtgacaactgccccagtaagactttcttgggagaaatgtatcagcagtgtctcatcttttgcgtatagcccccatcttctgacaatacatctttagatggttcttggagcaagtagtccccttgtacttgtcaaatttcagcaccttgaacttg

SEQ ID NO: 20050 - DNA, 404 bp, Glycine max
  unsure at all n locations
agcttgcatatcanagatttgttggaggaatcaaatcctggaggctgctgcatgtacacttcttcttgtagaatgccatggagaaagacattgttcacatccagctgctgtatgggccagtgataggtgacagccaaagtgagaagaagtctaacagtaataggcttaataactggtgaataagtctcttgaaatctgtgtcatattgcttgagggcaaagttgattgaggcttgtgattanatgaagaggaagagggaaagaggtcatacggaaatctggactcattgaacaccacatccttagatatgtagattctgccttagaagaaagacattagtagcctttgtgcgtangagaatatcccagaaaatgcattcttgagactgaattgngagttattct

SEQ ID NO: 20051 - DNA, 334 bp, Glycine max
  unsure at all n locations
tagcaatattgaagccgttgtataggtttgctgccagcgctgtcctcatcagaccattcaatgcctcagctactatattgaataaaaatggagctagagggtccccttgtctaagacccctttgaggcttgaactcctttgtggggctaccgttgactaaaactganattgaggctgatttcagacacccttccatccagctgatccatttaggacaaaatcctgttcttttcagcatataccagaaacaaattcatgataccgagtcataagccctttcataatcaactttgaatatgaggcagggttatggctcctcttagcttcatcaatg

SEQ ID NO: 20052 - DNA, 242 bp, Glycine max
  unsure at all n locations
attcctgataattcggattctgagactgtcctcaaactatctacaaattctctgcatgggacctgagaggttgtctaatanaagttgctgctctgaactacctttcatattgacaggcagaaagaattccaatatgtaatcatcatcattagtataagtactccttagcctaattgcaactgcagcattcaaattatactttgcgtgcatgatggacaagtgggtattcactaatatcatat

SEQ ID NO: 20053 - DNA, 376 bp, Glycine max
  unsure at all n locations
ctggatgcattggttaactaggtaacccagctgttcttgaaccanaaatctgtacctgtcgcaagggtctgtagtttgtgctcctctgctgaccaccatacagacctttgcccttccatgcaacaacctggagcaattgagcagcccgaagcttatgctgcaaatatttacaatagacctcctcaacctcagcagcaaaatcaaccacagcagaacaattatgacctctccagcaacagatacaaccctggatggaggaatcaccctaatctcagatggtctagccctcagcaacaacaatagcagcctgctcctttctatccaaatgttgttggcccaagcagaccgtacattcctccaccantccaacaacagc

SEQ ID NO: 20054 - DNA, 191 bp, Glycine max
actcggatgtccgattcatgcgcatgagatatcgattctcttgtatttgaataacacaagctctcgagagattggaatggtcataactcttcacaccgatgtccgaatcgggcgcataatatgtctagacgctctaaattgatcaacggaagctctcgataaattataatgggcataacttttcactcgga

SEQ ID NO: 20055 - DNA, 206 bp, Glycine max
tgatgacagctttccatcatctgctatacagtgattagatgaacgccaccatacttgctctgcactgttcataatgggatccatccagaacaggaggtctgttcactgtgcctccttctttctccatgtgcatcagaaccaacctacctagatctcactcagtgatttcgagcgaccgctctgataccaagtgaaattctgatact

SEQ ID NO: 20056 - DNA, 410 bp, Glycine max
  unsure at all n locations
cgacaataactatgtactcggatgtctgattgagtcccgaaatatatcgagacgctcgagatggaataccgaagctctgagcaaattcaaacgacaataactntntactcggatgtctgattgagtcccgtaatatatcgaaaagctcgaatgtgaatgtagaagctctgagcaaattcaaacgacaataactttttactcggatgtctgattgagtcccgtaatatatcgagacgctcgaaatggaataccgaagctctgagcaaattcanactacaataactttttactcggatgtccgattgagtcccgtaatatattcgagacgctcgaaattgaatgtcgaagctctgagcaaattctaacgacaataacttnttactcggatgtctgattgagtcccgaatata

SEQ ID NO: 20057 - DNA, 251 bp, Glycine max
tgcaacacttatatgacgtggtcgcagcttttctcttctatagaataattatgaccttggcggcagtagatacaatccaggttggaggaatcatccaaatctgagatagacaagtcctccacaacaacatcagcctgtccctcctttccaaaatgctactggtccaagcaagccatatgttcctcctccaatgcaacaacaacagtagcagtcacaacatagacaacaagcaactgaggctcctcctcaac

SEQ ID NO: 20058 - DNA, 282 bp, Glycine max
  unsure at all n locations
tctagtaggaattatggtggttgagtggcaccaaactcatgatgacttttgcatatcatccgcaatcggatggccaaactaaagttgctaatcatattgttgatcagtacttaggtgcttttgtccatataagaccatcagcttgngggtgtttcctattatgggaagaatggtcctacaatacatccctctattcagctacaagaatatctccattcgaaatcaccttcagcaggaagccacctaattttcctcagtatatagtatgtacctctaaaattg

SEQ ID NO: 20059 - DNA, 392 bp, Glycine max
gcccaacgctgtgttcatactctgccagaacctattatgttaatttatgatctctatcagacactatgctagatggcacaccatgtaatctgacaatctcactaatgcacagggaggtcaacttctctaaggaaagcctaatattgatggggataaagtgtgcgaatttggtcaatctttcaacaaacacccaaatagaatcaaaacctttgtggtcctgggtagtcctacaacgaaatccatggagatactatcccacttccacttgggtatctctaaaggttgtaacttacttgaaggtttgtgatattctatcttagccttttggtagactagacacgcatacacaaacttgctacctctctcttatgttgggccccaaaacattacct

SEQ ID NO: 20060 - DNA, 278 bp, Glycine max
  unsure at all n locations
ccgagtaaaagttatagtcgtgggaatttgctcagagcttcaacattcaatttcgagcatctcgctatattacgggactcaatcagacatccgagtaaaaagtttgttgtttgaattggctgagagcctcaacattcaatttcgagcgtctcgatatattaagggactcaatcagacatccgagtaaaaagttattgtcgtttgaatttgctcagagcatcgacattgaattgcgagcgtctcgatatattacnggactcaatcagacatccgagtaa

SEQ ID NO: 20061 - DNA, 362 bp, Glycine max
  unsure at all n locations
gaggtccagagactctacaagatgtgcagccttttttgatttaaccttttgctgacccagtaatacactagctntaactcgctattcatttgagctaattgtcttcatcatgtttcctttaggttgagataacctaaaccttttgatttcatattattttatggttatgcaggatattatacgactgccaatgctatttatctntcttcataagccattggcccaatttcgatctgttttaaaagccctaagagcacaaaggcttgcttcaatcggtggtggatctctttagaatataactgaacacatgcactgcctctccaaaacttatttgcatacatcactacagacatatatttcac

SEQ ID NO: 20062 - DNA, 351 bp, Glycine max
gatgcacacacctgtgagcaagcgacgaagccttttatcttctaacctgtgcgaacgaagagcgggagagctccacaaacacggcgagctaccaagagacctccatgtcttacaaggtgacgacaagctagctcgatctcgataactcagacatgacaatagctgaattactgtatcatcaggcaaacacttccaatcaacaaccccttgcctttgagttgccaaatccaaaacctcatcttgaacttcagggagactagactgcaccacattccctatgctatgtctcgccagctttcgtctcactctatgatccatgtctcaacaaaatcacagcatacccacaccaac

SEQ ID NO: 20063 - DNA, 173 bp, Glycine max
  unsure at all n locations
tggtcctaacttttaactcgtaggtctgattgaggcggataatatatcgacacgctccatattgaacaatggaagctcttgagcaattcanatggtcataaatagtcactcggaggtccgattcaggcgcataatttatcgagacgctcgaaattgaacaacggaagctctca

SEQ ID NO: 20064 - DNA, 262 bp, Glycine max
  unsure at all n locations
actatgcagagaatatccaagagaaataccttcttcagatttatcatcaaattntcctaagtgatgtttggcattattcaatacaaaacatttacaaccaaagatataaagatgtgagatgtttggttttttgccattgaacaattcatatggagctttctttataatgggtcctattaaagccctatttaaatgtaacatgcagtggtaacagcttcaaccctggcataccctaatttcgtccggggacctttgcttgatg

SEQ ID NO: 20065 - DNA, 320 bp, Glycine max
ccaagtaaaaattaatggcgggtgggattggctcaaagattcaacattcaatttcgagcgtctccatatattacgggactcattcagacatccgagtaaaaagttattgtagtttgaattagcttagagcttcaacaatcaatttcgagtgtctcgttatatcacgagactcaatcagacatccgagtaaaaagttattgtcgtttgaattggctcagagcttccacattcaatttcgagcgtgtcgatatattacgggcgtcaatcagacatccgagtaaaaagttattgtcgtttgaattcgctcagagcttcaacat

SEQ ID NO: 20066 - DNA, 300 bp, Glycine max
tcatccaaccttatatggtcgaatccttcacaacagcagcagcaacaataacaaccttatcttcaaaatgttgttggtccagcacacattacgttcctccactaatccaccaacaacaacagcaacagcccccgaaacaacaaactatagatgctcctccacaaccttcccttgaagaacttgtgaggcaaatgactatgacaaacatgcagcttcacaacagaccatagctgccattcagagcttgactaaattagatgggacaattggctacacacttaaatcaacagctggaccaaa

SEQ ID NO: 20067 - DNA, 371 bp, Glycine max
agcttattattgtagatgttgatcatgctaagcttggagacgaaatcatgaaatttgggtggtgccaatgctttggtgagaaaatctgccacttgatcacttgttgaaactggtagtagctttagagtgcccttcaaaagcttctctcgcacaagatggcaatcaatttccaagtgttttgtgcgttcgtgataaaccggatttgaggcaatgtggactgcgctttggttgtcacagtaaagagttggagttctggtaagctgaactctcaaatctgcagaaagatacaacagccattgcaactcacaagcagctgaaaacagagccctgtactctgcttctgaagatgatctggacacagttgcttgctt

SEQ ID NO: 20068 - DNA, 314 bp, Glycine max
tcattgatcgtctcgatatatacggttctattttacatctgaggaaaaaagctatggtggtttgaatttgctgagagctccaacattcaattttgagcgtctcgatgtattactggacttaatcagacatccgagttaatagttattgctgtttgaatttgctgagagcttcagcattcaatttcgagcgtctcgatattttacgggactcaatcaaacatccgagcttaaagttattgttgttggaatttgctgagagcttcaacattcaatttcgagcgtctcgatattttacgggactcaatcatacatcc

SEQ ID NO: 20069 - DNA, 384 bp, Glycine max
actatcgctccagtgctagtgtttcctatcccgagaaaaccctttgaggtgtattgtgatggatcaaagatgggtttaggaggagtattgatgcaaaatggccaagtagtggcctatgcttctagacaactcaagactcatgagaggaattatcccacccatgatctggagttggctgctgtagttttttccctttagatgtggaggcattacctgtttggctctaagtttgaggtgtttagtgatcataagatccttaagtactcgtttagtctgaaaaagttgaacatgcatcaaaggagatggttaaagtttcttaaagattatgattttgagcttagctaccatctcaacaaagccaatgtagtggctgacgccttgagt

SEQ ID NO: 20070 - DNA, 293 bp, Glycine max
gggggggggttgaattaagatatccccaactgtttcccctaattaaaaatctattccactttttactcaagttatgaatccccttaatgacaatcttcttaaatattaattcgagcaaagcaacttgattatgaatataaagcaataatatataaaggagattaagggaagagaaaatgcaaactcagttttatactggttcggccacacccttgtgcctacgttcagtccccaagcaatccgcttgagagttccactatcttggtaattccttttacaaggtcttaacacac

SEQ ID NO: 20071 - DNA, 299 bp, Glycine max
agcttcttatttgtgcttggtgcattagcgagcccaagaggcatgactagccattcatacaaaccaaacttggtcttgaaagcggttttgcactcatcaccctccttcattctgattaggtgataaccacttttaagattaattattgaaaagatgttggcaccatgcaactcatcatgtaaatcatcaagtctatgaatgtggcgcctatactttacagaaatgttgtagatggccctgcaatctgtacacattctcacgtaccatcctttgtgggcaccaacaacactggcacaaca

SEQ ID NO: 20072 - DNA, 401 bp, Glycine max
  unsure at all n locations
caaacattaaaagggagaaggtaatattgtagccgatgctctttctcggcttcatgcattactttctatgcttgaaacaaaattgattggtcttgaatgtttgaaaagcatgtatgaaaatgatgaaacttttagagaaatttttaaaaattgtgaaaaattttcagaaaatggtttctttagacatgaaggctttcttttcaaagaaaacaaattgtgtgtgcctaaatgttctactagaaattttcttgtttgtgaagcacatgaaggaggtttaatggggcattttgggatccaaaagactctagaaacattacaagaacatttttattggcctcatatganaaaggatgtccacaaattttgtgaacattgcattgtatgtaaaaaggcaaagtcta

SEQ ID NO: 20073 - DNA, 372 bp, Glycine max
  unsure at all n locations
agctcangttttgaatatgatggcanaccttcataattgttgttcaacacatacaagctcacttgtaaaaaatcttctacacttggagtgataacatgcagtcctcttgaacccttactgcccactctgtcgtcatggcgagactcaagaaggccaacaggtntagccttttcaatgtactctanacaaaattcaatggcttcttctgcaatgtacctttcaacaatagatgcttctggacaatgtagattcttggtatacccttttaagatcttcatgtatcgctcaaccgagtacatccaccataaataaacaggaccacaacatttgatttctctgactagatgaacaattaagtgaatcatgatgtca

SEQ ID NO: 20074 - DNA, 438 bp, Glycine max
  unsure at all n locations
gagaatggacttcagaagtgtttcanaagttacaaactacttcaaggaaaacatgaaggaggtatagataattctttaaaaatttccattcaatcatgtgatgactttgaaagtctaaaattaaagacaacaaagctttgtcttgaaaatgaggatatttgtaaataaagatatagtatattggaagaccttcagaagttgaaaaatcaactggaaggcttacaaaatgagtatatcacactcaataaacttcatgattgcctaaatgaggaaagatgtaatctattgaaagcatgttcccaagtccataagaattatgaaaacttggaggcaagtaaacatatgatgtagctccaagtagagcttgtaagccttggatctttttcatcaatggagtattttgcttcttgaagagatcaatggcagtggaatgaaaaa

SEQ ID NO: 20075 - DNA, 314 bp, Glycine max
  unsure at all n locations
ataaaaggaacctaattgaagccaccagtaagaaccataacccgcttccctccatggatcaaatgcttgagagacttgcagggcaatctttctattattttttagatggatattcgggctataatcaaattgcagcggatccttatgaccaagagaagatagctttcacatgccccttcggtgtatttgcttattgccgcatgtcattcagcctatgtaatgccncaactactttccagagatgtatgatggcaatttttgctgacatgatagagacatgtattcaagtatgtatggatgatttctcttctttg

SEQ ID NO: 20076 - DNA, 393 bp, Glycine max
  unsure at all n locations
cttaaatgtnggaagtacacgcgtggtctattgataagatcaaagaccagcacaaggatctgcaagatatggaatctactttgaaggagctattggtattgttgttggattctttgattctgttttaagattcataggatattgtaccttaattgttgagtttctcacgaccaaggttcagctcgattaatggaactgaaaagtcttcacgaggaaagaataagaatattacagcagttgtgtgatctacaggtatttttttcccttaatactatgtacaccagtattttaactagtatttctttcctacaatgcatgtatgtgtattttctttttgcttttataaggcttgatgttcatgattggatcataacactttgaagaatttgaagt

SEQ ID NO: 20077 - DNA, 362 bp, Glycine max
ccctctcattcacatgtcccaaccttctgagtcatattttagtctttgacaacctgttgacatagactgcagcaactgatcccatgagcaatcctgcaattagagaatacatgccattcttttgtatccctctcatgaatatcaaagagccatttagaactccattctcccctttgaacacataaccttgtttgtcaaaatcactcagagaaatcaaatttctcttcaaatctaagacaagccttacattcttgatgactctctcaacaccatcatgaagcttaaacctcacagacccaactcaagtgatcttacaggacttgttgattccaagtaggattgaaccaccaacttgttcatca

SEQ ID NO: 20078 - DNA, 377 bp, Glycine max
  unsure at all n locations
agcttnggtcggactataccaagctctaggacccagggacggataaagatctatatatgggctcgctaagggtagagagaggaagactatagatttggatcaagtaaagtgtgttaaggatgaagaacgcaaagtcttagtgcatgaaaaagatatcaaggaaaggtggaatgtgtatttccacaacttatgtaatgatggatatggatatgactctagcagtctagacacaagagaagaggaccggaactataagtactatcgtcggattcagaaacaggaagtaaaggaagcgttgaatagaatgagtaatggtaaggcggtggggccagacaacatacctattgaagtgtggaaaactctaggagatagaggtc

SEQ ID NO: 20079 - DNA, 412 bp, Glycine max
  unsure at all n locations
caccacccctcactctaagccttataagnngtaangtgttgagtgacaatggtgagtcggtgggggataagcaagtgttacttacattctccatcggaaattatgttgatgaagtgctttgtgatatggttcccatggaagccagacatgtgttgcttgggagaccttggcaatatgatagagatgctgtccacaatagggtcaccaattgatattctttcttgcataaaggtaaaatggtagttctctcacctttgtctccaagtgaggtttgtgaggatcaaataaaaatgagattgaaaagagaaaaagaaaagatattcaaagtaagaaaaagtcctttgagagagaataaccacaaagaagagaaaacataagagtgaaaccaattagttataaagagagtttgtta

SEQ ID NO: 20080 - DNA, 251 bp, Glycine max
agcttgtagtatacgctaacgacaataacatttcactcggaagtccgattgagtcccgtattatatctagacgctcgcaattcaaaaccgaagctcgcagctaatgctaacgacaatagcatttcactcggaagtgagattgagtcccgcatatatcgagacgctcgaatattaaaaccgacgcttgcagcgaatgctatcgacgataacgtttcactcggaagtccgattgagtcccgtattagatcgag

SEQ ID NO: 20081 - DNA, 249 bp, Glycine max
gaccatgggaacacctctagagcgggggatgttcaatttctagcacccacatatattatgagcctgaatcggacatccgggtgacaagttgtgaccatcataatttctctacaccataccgtgctcaataacgagcgtctcgagagattacgcgcgtgaatccgacgtccgtgtgaaaggtatgaccatctgggtcgttcgagagcttccgttgggcaaaatcaagcggcccgatttattatacacctg

SEQ ID NO: 20082 - DNA, 417 bp, Glycine max
  unsure at all n locations
tcctcttagtagggaatatatccttcctaagatggtgccttacccagtccccttcattaagaacgagctcatttcttcctctatttcctttagtagcatacacctttggttggttcctaaccctctcatgcaacttctttacaaactctaaccttgattccccttctttatgtataaaagaagtgtcaagtgggaggggaattaggtcttagggtgttagaggattgaacccatagataacctcaaaaggggattgcttggttgttctatgaatccccctgtngtaggaaaattctacataaggaagatactaatcctaagacttatgggttcctttcagaaaagcccttaaaagggtggatagagacccattcactacctttgtttgcccatcaatttatggatgacaagtggtag
